(19) United States
(12) Patent Application Publication
(10) Pub. No.: US 2014/0359900 A1
(43) Pub. Date: Dec. 4, 2014

(54) PRODUCTION OF DHA AND OTHER LC PUFAS IN PLANTS

(71) Applicants: Terence A. Walsh, Zionsville, IN (US); Daniel Gachotte, Indianapolis, IN (US); Ann Owens Merlo, Carmel, IN (US); Dayakar Reddy Pareddy, Carmel, IN (US); James Metz, Longmont, CO (US); Scott Bevan, Indianapolis, IN (US); Jerry Kuner, Longmont, CO (US)

(72) Inventors: Terence A. Walsh, Zionsville, IN (US); Daniel Gachotte, Indianapolis, IN (US); Ann Owens Merlo, Carmel, IN (US); Dayakar Reddy Pareddy, Carmel, IN (US); James Metz, Longmont, CO (US); Scott Bevan, Indianapolis, IN (US); Jerry Kuner, Longmont, CO (US)

(73) Assignees: DSM IP ASSETS B.V., TE Heerlen (NL); DOW AGROSCIENCES LLC, Indianapolis, IN (US)

(21) Appl. No.: 14/235,435

(22) PCT Filed: Jul. 26, 2012
(86) PCT No.: PCT/US12/48355

§ 371 Date: Apr. 4, 2014

(30) Foreign Application Priority Data
Jul. 26, 2011 (US) 61511878

(51) Int. Cl. C12N 15/82; C12P 7/64

(52) U.S. Cl. CPC C12N 15/8247; C12P 7/6427
USPC 800/281; 435/134; 435/468

(57) ABSTRACT

The invention provides recombinant host organisms genetically modified with a polyunsaturated fatty acid (PUFA) synthase system and one or more accessory proteins that allow for and/or improve the production of PUFAs in the host organism. The present invention also relates to methods of making and using such organisms as well as products obtained from such organisms.

### CROSS-REFERENCE TO RELATED APPLICATIONS

[0001] This application is a national phase entry under 35 U.S.C. §371 of International Patent Application PCT/US2012/048355, filed Jul. 26, 2012, designating the United States of America and published in English as International Patent Publication WO 2013/016546 A2 on Jan. 31, 2013, which claims the benefit under Article 8 of the Patent Cooperation Treaty and under 35 U.S.C. §119(e) to U.S. Provisional Patent Application Ser. No. 61/511,878, filed Jul. 26, 2011, the disclosure of each of which is hereby incorporated herein in its entirety by this reference.

### STATEMENT ACCORDING TO 37 C.F.R. §1.821(c) or (e)

### Sequence Listing Submitted as a Txt and Pdf Files

[0002] Pursuant to 37 C.F.R. §1.821(c) or (e), files containing a TXT version and a PDF version of the Sequence Listing have been submitted concomitant with this application, the contents of which are hereby incorporated by reference.

### BACKGROUND OF THE INVENTION

[0003] 1. Field of the Invention

[0004] The present invention generally relates to recombinant host organisms (e.g., plants) genetically modified with a polyunsaturated fatty acid (PUFA) synthase system and one or more accessory proteins that allow for and/or improve the production of PUFAs in the host organism. The present invention also relates to methods of making and using such organisms (e.g., to obtain PUFAs) as well as products obtained from such organisms (e.g., oil and seed).

[0005] 2. Background Art

[0006] Polyunsaturated fatty acids (PUFAs) are considered to be useful for nutritional applications, pharmaceutical applications, industrial applications, and other purposes. However, the current supply of PUFAs from natural sources (e.g., fish oils) and from chemical synthesis is not sufficient for long-term commercial needs.

[0007] Vegetable oils derived from plants (e.g., oil seed crops) are relatively inexpensive and do not have the contamination issues associated with fish oils. However, the PUFAs found in commercially-developed plants and plant oils do not typically include more saturated or longer-chain PUFAs, and only typically include fatty acids such as linoleic acid (eighteen carbons with 2 double bonds, in the delta 9 and 12 positions—18:2 delta 9,12) and linolenic acid (18:3 delta 9,12,15).

[0008] The production of more unsaturated or longer-chain PUFAs in plants by the modification of the fatty acids endogenously produced by plants has been described. For example, the genetic modification of plants with various individual genes encoding fatty acid elongases and/or desaturases has been described as resulting in the generation of leaves or seeds containing significant levels of longer-chain and more unsaturated PUFAs such as eicosapentaenoic acid (EPA), but also containing significant levels of mixed shorter-chain and less unsaturated PUFAs (Qi et al., Nature Biotech. 22:739 (2004); WO 04/071467; Abbadi et al., Plant Cell 16:1 (2004); Napier and Sayanova, Proceedings of the Nutrition Society 64:387-393 (2005); Robert et al., Functional Plant Biology 32:473-479 (2005); U.S. Appl. Pub. No. 2004/0172682, U.S. Appl. No. 61/345,537, filed May 17, 2010).

[0009] Fabaceae (or Leguminosae) is a large and economically important family of flowering plants, which is commonly known as the legume family, pea family, bean family or pulse family. Glycine is a genus in the family Fabaceae and includes, for example, Glycine albicans, Glycine aphyonota, Glycine arenari, Glycine argyrea, Glycine canescens, Glycine clandestine, Glycine curvata, Glycine cyrtoloba, Glycine falcate, Glycine gracei, Glycine hirticaulis, Glycine hirticaulis subsp. leptosa, Glycine lactovirens, Glycine latifolia, Glycine latrobeana, Glycine microphylla, Glycine montis-douglas, Glycine peratosa, Glycine pescadrensis, Glycine pindanica, Glycine pullenii, Glycine rubiginosa, Glycine stenophita, Glycine syndetika, Glycine tabacina, Glycine tomentella, Glycine soja, and Glycine max (soybean). The family Fabaceae also includes peanut, beans (Phaseolus vulgaris), broad beans (Vicia faba) or peas (Pisum sativum).

[0010] The majority of soybean oil is in the form of vegetable oils produced for human consumption. There is also a growing market for the use of soybean oil in industrial applications.

### BRIEF SUMMARY OF THE INVENTION

[0011] There is a need in the art for a relatively inexpensive method to efficiently and effectively produce quantities (e.g., commercial quantities) of longer-chain or more unsaturated PUFAs in plants, plant seed or plant oil, as well as quantities of lipids (e.g., triacylglycerol (TAG) and phospholipid (PL)) enriched in such PUFAs in plants, plant seed or plant oil. A system for providing and improving PUFA production in host organisms (e.g., plants) by providing recombinant host organisms genetically modified with a polyunsaturated fatty acid (PUFA) synthase and one or more accessory proteins, as described herein, is a significant alternative to the approaches in the art.

[0012] The present invention is directed to genetically modified plants (e.g., plants of the family Fabaceae or the genus Glycine such as soybean), descendants, seeds, cells, tissues, or parts thereof, comprising (i) a nucleic acid sequence encoding a polyunsaturated fatty acid (PUFA) synthase (e.g., an algal PUFA synthase) that produces at least one PUFA; and (ii) a nucleic acid sequence encoding a phosphopantetheinyl transferase (PPTase) that transfers a phosphopantetheinyl cofactor to an PUFA synthase system (e.g., an algal PUFA synthase system) ACP domain.

[0013] In some embodiments of the present invention, the PUFA synthase comprises an amino acid sequence that is 80% to 99% identical to the amino acid sequence of SEQ ID NO: 1 or comprises the amino acid sequence of SEQ ID NO:1. In some embodiments, the nucleic acid sequence encoding the PUFA synthase comprises a nucleic acid sequence 80% to 99% identical to the nucleic acid sequence of SEQ ID NO:6 or comprises the nucleic acid sequence of SEQ ID NO:6. In some embodiments, the PUFA synthase comprises an amino acid sequence that is 80% to 99% identical to the amino acid sequence of SEQ ID NO:2 or comprises the amino acid sequence of SEQ ID NO:2. In some embodiments, the nucleic acid sequence encoding the PUFA synthase comprises a nucleic acid sequence that is 80% to 99% identical to the nucleic acid sequence of SEQ ID NO:7 or comprises the nucleic acid sequence of SEQ ID NO:7. In some embodiments, the PUFA synthase comprises an amino acid sequence that is 80% to 99% identical to the amino acid sequence of SEQ ID NO:3 or comprises the amino acid sequence of SEQ ID NO:3. In some embodiments, the nucleic acid sequence encoding the PUFA synthase comprises a nucleic acid sequence that is 80% to 99% identical to the nucleic acid sequence of SEQ ID NO:8 or comprises the nucleic acid sequence of SEQ ID NO:8. In some embodiments, the PUFA synthase comprises the amino acid sequence of SEQ ID NOs: 1, 2, or 3 or any combination thereof. In some embodiments, the nucleic acid sequence encoding the PUFA synthase comprises the nucleic acid sequence of SEQ ID NOs: 6, 7 or 8 of any combination thereof.

[0014] In some embodiments, the PPTase comprises an amino acid sequence that is 80% to 99% identical to SEQ ID NO:5 or comprises the amino acid sequence of SEQ ID NO:5. In some embodiments, the nucleic acid sequence encoding the PPTase is 80% to 99% identical to the nucleic acid sequence of SEQ ID NO:10 or comprises the nucleic acid sequence of SEQ ID NO:10.

[0015] In some embodiments, the nucleic acid sequences of (i) and (ii) are contained in a single recombinant expression vector. In some embodiments, the nucleic acid sequences of (i) and (ii) are contained in different recombinant expression vectors. In some embodiments, the nucleic acid sequence(s) of (i) and/or (ii) are operably linked to a seed-specific promoter. In some embodiments, the nucleic acid sequence(s) of (i) and/or (ii) are operably linked to a promoter selected from PvDlec2, PvPhaseolin, LfKCS3, FAE 1, BoACP and BnaNapinC. In some embodiments, the nucleic acid sequence(s) of (i) and/or (ii) are operably linked to a leaf-specific promoter. In some embodiments, the nucleic acid sequence(s) of (i) and/or (ii) are operably linked to a ubiquitin or CsVMV promoter.

[0016] In some embodiments, the genetically modified plant, descendant, seed, cell, tissue, or part thereof further comprises (iii) a nucleic acid sequence encoding an acyl-CoA synthetase (ACoAS) that catalyzes the conversion of long chain PUFA free fatty acids (PFFA) to acyl-CoA. In some embodiments, the ACoAS comprises an amino acid sequence that is 80% to 99% identical to SEQ ID NO:4 or comprises the amino acid sequence of SEQ ID NO:4. In some embodiments, the ACoAS comprises a nucleic acid sequence that is 80% to 99% identical to the nucleic acid sequence of SEQ ID NO:9 or comprises the nucleic acid sequence of SEQ ID NO:9. In some embodiments, the nucleic acid sequence encoding the ACoAS comprises the nucleic acid sequence of SEQ ID NO:34. In some embodiments, the nucleic acid sequences of (i), (ii) and/or (iii) are contained in a single recombinant expression vector. In some embodiments, the nucleic acid sequences of (i), (ii) and (iii) are contained in different recombinant expression vectors. In some embodiments, the nucleic acid sequences of (i) and (ii) are contained in a single recombinant expression vector and the nucleic acid sequence of (iii) is contained in a different recombinant expression vector. In some embodiments, the nucleic acid sequences of (i) and (iii) are contained in a single recombinant expression vector and the nucleic acid sequence of (ii) is contained in a different recombinant expression vector. In some embodiments, the nucleic acid sequences of (ii) and (iii) are contained in a single recombinant expression vector and the nucleic acid sequence of (i) is contained in a different recombinant expression vector. In some embodiments, the nucleic acid sequence(s) of (i), (ii) and/or (iii) are operably linked to a seed-specific promoter. In some embodiments, the nucleic acid sequence(s) of (i), (ii) and/or (iii) are operably linked to a promoter selected from PvDlec2, LfKCS3, FAE 1, BoACP and BnaNapinC. In some embodiments, the nucleic acid sequence(s) of (i), (ii) and/or (iii) are operably linked to a leaf-specific promoter. In some embodiments, the nucleic acid sequence(s) of (i), (ii) and/or (iii) are operably linked to a ubiquitin or CsVMV promoter.

[0017] In some embodiments, the genetically modified plant, descendant, cell, tissue, or part thereof further comprises a nucleic acid sequence encoding an acetyl CoA carboxylase (ACCase) and/or a nucleic acid sequence encoding a type 2 diacylglycerol acyltransferase (DGAT2).

[0018] In some embodiments, the genetically modified plant, descendant, cell, tissue, seed or part thereof comprising at least one of pDAB7361, pDAB7362, pDAB7363, pDAB7368, pDAB7369, pDAB7370, pDAB100518, pDAB101476, pDAB101477, pDAB9166, pDAB9167, pDAB7379, pDAB7380, pDAB9323, pDAB9330, pDAB9337, pDAB9338, pDAB9344, pDAB9396, pDAB101412, pDAB7733, pDAB7734, pDAB101493, pDAB109507, pDAB109508, pDAB109509, pDAB9151, pDAB108207, pDAB108208, pDAB108209, pDAB9159, pDAB9147, pDAB108224, and pDAB108225.

[0019] In some embodiments, a genetically modified plant, descendant, cell, tissue, seed, or part thereof or an oil (e.g., a seed oil) obtained from the genetically modified plant, descendant, seed, cell, tissue, or part thereof comprises detectable amounts of DHA (docosahexaenoic acid (C22:6, n-3)), DPA(n-6) (docosapentaenoic acid (C22:5, n-6)) and/or EPA (eicosapentaenoic acid (C20:5, n-3)). In some embodiments, the genetically modified plant, descendant, cell, tissue, seed, or part thereof or an oil (e.g., a seed oil) obtained from the genetically modified plant, descendant, seed, cell, tissue, or part thereof comprises 0.01% to 15% DHA by weight of total fatty acids, 0.05% to 10% DHA by weight of total fatty acids, or 0.05% to 5% DHA by weight of total fatty acids. In some embodiments, the genetically modified plant, descendant, cell, tissue, seed, or part thereof or an oil (e.g., a seed oil) obtained from the genetically modified plant, descendant, seed, cell, tissue, or part thereof comprises 0.01% to 10% EPA by weight of total fatty acids, 0.05% to 5% EPA by weight of total fatty acids, or 0.05% to 1% EPA by weight of total fatty acids. In some embodiments, the genetically modified plant, descendant, cell, tissue, seed, or part thereof or an oil (e.g., a seed oil) obtained from the genetically modified plant, descendant, seed, cell, tissue, or part thereof comprises 0.01% to 10% DPA(n-6) by weight of total fatty acids, 0.01% to 5% DPA(n-6) by weight of total fatty acids, or 0.01% to 1% DPA(n-6) by weight of total fatty acids. In some embodiments, the genetically modified plant, descendant, cell, tissue, seed, or part thereof or an oil (e.g., a seed oil) obtained from the genetically modified plant, descendant, seed, cell, tissue, or part thereof comprises a ratio of EPA:DHA of 1:1 to 1:10 or 1:1 to 1:3 by weight of total fatty acids. In some embodiments, the genetically modified plant, descendant, cell, tissue, seed, or part thereof or an oil (e.g., a seed oil) obtained from the genetically modified plant, descendant, seed, cell, tissue, or part thereof comprises a ratio of DPA(n-6):DHA of 1:1 to 1:10 or 1:1 to 1:3 by weight of total fatty acids. In some embodiments, the oil (e.g., a seed oil) obtained from a genetically modified plant, descendant, cell, tissue, seed, or part thereof comprises 70% to 99% triglycerides by weight of the oil.

[0020] In some embodiments, the detectable amounts of DHA, DPA(n-6) and/or EPA are also found in grain and/or meal obtained from the genetically modified plant, descendant, tissue, seed, or part thereof.

[0021] The present invention is directed to an oil (e.g., a seed oil) or a seed obtained from a genetically modified plant (e.g., soybean), descendant, cell, tissue, or part thereof described herein. The present invention is directed to a food product comprising an oil (e.g., a seed oil) obtained from a genetically modified plant (e.g., soybean), descendant, cell, tissue, or part thereof described herein. The present invention is also directed to a functional food comprising an oil (e.g., a seed oil) or a seed obtained from a genetically modified plant (e.g., soybean), descendant, cell, tissue, or part thereof described herein. The present invention is directed to a pharmaceutical product comprising an oil (e.g., a seed oil) or a seed obtained from a genetically modified plant (e.g., soybean), descendant, cell, tissue, or part described herein.

[0022] The present invention is directed to a method to produce an oil comprising at least one LC-PUFA, comprising recovering oil from a genetically modified plant (e.g., soybean), descendant, cell, tissue, or part thereof described herein or from a seed of a genetically modified plant (e.g., soybean), descendant, cell, tissue, or part thereof described herein. The present invention is also directed to a method to produce an oil comprising at least one LC-PUFA, comprising growing a genetically modified plant (e.g., soybean), descendant, cell, tissue, or part thereof described herein. The present invention is also directed to a method to produce at least one LC-PUFA in a seed oil, comprising recovering oil from a seed of a genetically modified plant (e.g., soybean), descendant, cell, tissue, or part thereof described herein.

[0023] The present invention is directed to a method to produce at least one PUFA in a seed oil, comprising growing a genetically modified plant (e.g., soybean), descendant, cell, tissue, or part thereof described herein. The present invention is also directed to a method to provide a supplement or therapeutic product containing at least one PUFA to an individual, comprising providing to the individual a genetically modified plant (e.g., soybean), descendant, cell, tissue, or part thereof of described herein, an oil described herein, a seed described herein, a food product described herein, a functional food described herein, or a pharmaceutical product described herein. In some embodiments, a PUFA contained in such embodiments is DHA, DPA(n-6) and/or EPA.

[0024] The present invention is directed to a method to produce a genetically modified plant (e.g., soybean), descendant, cell, tissue, or part thereof described herein, comprising transforming a plant or plant cell with (i) a nucleic acid sequence encoding a PUFA synthase (e.g., an algal PUFA synthase) that produces at least one polyunsaturated fatty acid (PUFA); and (ii) a nucleic acid sequence encoding a phosphopantetheinyl transferase (PPTase) that transfers a phosphopantetheinyl cofactor to an PUFA synthase (e.g., an algal PUFA synthase) ACP domain. In some embodiments, the method further comprises transforming the plant or plant cell with (iii) a nucleic acid sequence encoding an acyl-CoA synthetase (ACoAS) that catalyzes the conversion of long chain PUFA free fatty acids (FFA) to acyl-CoA.

### BRIEF DESCRIPTION OF DRAWINGS

[0025] The various embodiments of the invention can be more fully understood from the following detailed description, the figures, and the accompanying sequence descriptions, which form a part of this application.

[0026] FIG. 1 depicts the Clustal W (alignments in Vector NTI) of the redesigned DNA sequences encoding each of the 9 repeat domains of PUFA OrfA.

[0027] FIG. 2 is a plasmid map of pDAB7362.

[0028] FIG. 3 is a plasmid map of pDAB7361.

[0029] FIG. 4 is a plasmid map of pDAB7363.

[0030] FIG. 5 is a plasmid map of pDAB7365.

[0031] FIG. 6 is a plasmid map of pDAB7368.

[0032] FIG. 7 is a plasmid map of pDAB7369.

[0033] FIG. 8 is a plasmid map of pDAB7370.

[0034] FIG. 9 is a plasmid map of pDAB100518.

[0035] FIG. 10 is a plasmid map of pDAB101476.

[0036] FIG. 11 is a plasmid map of pDAB101477.

[0037] FIG. 12 shows the DHA and LC-PUFA content of single T2 soybean seeds from T1 plants derived from two soybean events transformed with pDAB7362.

[0038] FIG. 13 shows Western blot detection of PUFA synthase OrfA, PUFA synthase OrfB, and PUFA synthase chimeric OrfC in T2 soybean seed protein extracts.

[0039] FIG. 14 is a plasmid map of pDAB9166.

[0040] FIG. 15 is a plasmid map of pDAB9167.

[0041] FIG. 16 is a plasmid map of pDAB7379.

[0042] FIG. 17 is a plasmid map of pDAB7380.

[0043] FIG. 18 is a plasmid map of pDAB9323.

[0044] FIG. 19 is a plasmid map of pDAB9330.

[0045] FIG. 20 is a plasmid map of pDAB9337.

[0046] FIG. 21 is a plasmid map of pDAB9338.

[0047] FIG. 22 is a plasmid map of pDAB9344.

[0048] FIG. 23 is a plasmid map of pDAB9396.

[0049] FIG. 24 is a plasmid map of pDAB101412.

[0050] FIG. 25 is a plasmid map of pDAB7733.

[0051] FIG. 26 is a plasmid map of pDAB7734.

[0052] FIG. 27 is a plasmid map of pDAB101493.

[0053] FIG. 28 is a plasmid map of pDAB109507.

[0054] FIG. 29 is a plasmid map of pDAB109508.

[0055] FIG. 30 is a plasmid map of pDAB109509.

[0056] FIG. 31 is a plasmid map of pDAB9151.

[0057] FIG. 32 is a plasmid map of pDAB108207.

[0058] FIG. 33 is a plasmid map of pDAB108208.

[0059] FIG. 34 is a plasmid map of pDAB108209.

[0060] FIG. 35 is a plasmid map of pDAB9159.

[0061] FIG. 36 is a plasmid map of pDAB9147.

[0062] FIG. 37 is a plasmid map of pDAB108224.

[0063] FIG. 38 is a plasmid map of pDAB108225.

[0064] FIG. 39 shows DHA and LC-PUFA content of T2 seed from individual transgenic Arabidopsis events transformed with pDAB101493, pDAB7362, pDAB7369, pDAB101412 or pDAB7380.

### DETAILED DESCRIPTION OF THE INVENTION

[0065] The term “polyunsaturated fatty acid” or “PUFA” as used herein refers to fatty acids with a carbon chain length of at least 16 carbons, at least 18 carbons, at least 20 carbons, or 22 or more carbons, with at least 3 or more double bonds, 4 or more double bonds, 5 or more double bonds, or 6 or more double bonds, wherein all double bonds are in the cis configuration.

[0066] The term “long chain polyunsaturated fatty acids” or “LC-PUFAs” as used herein refers to fatty acids of 20 and more carbon chain length, containing 3 or more double bonds, or 22 or more carbons, with at least 3 or more double bonds, 4 or more double bonds, 5 or more double bonds, or 6 or more double bonds. LC-PUFAs of the omega-6 series include, but are not limited to, di-homo-gamma-linolenic acid (C20:3n-6), arachidonic acid (C20:4n-6), adrenic acid (also called docosatetraenoic acid or DTA) (C22:4n-6), and docosapentaenoic acid (C22:5n-6). LC-PUFAs of the omega-3 series include, but are not limited to, eicosatrienoic acid (C20:3n-3), eicosatetraenoic acid (C20:4n-3), eicosapentaenoic acid (C20:5n-3), docosapentaenoic acid (C22:5n-3), and docosahexaenoic acid (C22:6n-3). LC-PUFAs also include fatty acids with greater than 22 carbons and 4 or more double bonds including but not limited to C28:8(n-3).

[0067] The term “PUFA synthase” as used herein refers to an enzyme that produces polyunsaturated fatty acids (PUFAs) and particularly, long chain PUFAs (LC-PUFAs) as well as any domain of such an enzyme in a complex. The teen PUFA synthase includes, but is not limited to, PUFA PKS systems or PKS-like systems for the production of PUFAs. Some specific PUFA synthases are designated herein by an additional notation, e.g., “SzPUFA” synthase or “hSzThPUFA” synthase, as defined in the application. The term “PUFA synthase system” includes a PUFA synthase and any accessory enzymes that can affect the function of the PUFA synthase when expressed in a heterologous organism (e.g., a PPTase or ACS).

[0068] The terms “phosphopantetheinyl transferase” and “PPTase” as used herein refer to an enzyme that activates a PUFA synthase by transferring a cofactor (e.g., 4-phosphopantetheine) from coenzyme A (CoA) to one or more ACP domains present in the PUFA synthase. One example of a PPTase that can activate one or more ACP domains of a PUFA synthase described herein is the Het I protein of Nostoc sp. PCC 7120 (formerly called Anabaena sp. PCC 7120), designated herein as “NoHetI.”

[0069] The terms “acyl-CoA synthetase,” “ACoAS” and “ACS” as used herein refer to an enzyme that catalyzes the conversion of long chain polyunsaturated free fatty acids (FFA) to acyl-CoA. Some specific acyl-CoA synthetases are designated herein by an additional notation, e.g., “SzACS-2,” as defined in the application.

[0070] The term “plant” as used herein includes any descendant, cell, tissue, seed, seed oil, or part thereof.

[0071] “Nutraceutical” means a product isolated, purified, concentrated, or produced from plants that provides a physiological benefit or provides protection against disease, including processed foods supplemented with such products, along with foods produced from crops that have been genetically engineered to contain enhanced levels of such physiologically-active components.

[0072] “Functional food” means a food that (a) is similar in appearance to or can be a conventional food that is consumed as part of a usual diet and (b) has enhanced nutritional value and/or specific dietary benefits based on a modification in the proportion of components that typically exist in the unmodified food.

[0073] The terms “polynucleotide” and “nucleic acid” are intended to encompass a singular nucleic acid as well as plural nucleic acids, a nucleic acid molecule or fragment, variant, or derivative thereof, or construct, e.g., messenger RNA (mRNA) or plasmid DNA (pDNA). A polynucleotide or nucleic acid can contain the nucleotide sequence of the full-length cDNA sequence, or a fragment thereof, including the untranslated 5′ and 3′ sequences and the coding sequences. A polynucleotide or nucleic acid can be composed of any polyribonucleotide or polydeoxyribonucleotide, which can be unmodified RNA or DNA or modified RNA or DNA. For example, a polynucleotide or nucleic acid can be composed of single- and double-stranded DNA, DNA that is a mixture of single- and double-stranded regions, single- and double-stranded RNA, and RNA that is a mixture of single- and double-stranded regions, hybrid molecules comprising DNA and RNA that can be single-stranded or, more typically, double-stranded or a mixture of single- and double-stranded regions. These terms also embrace chemically, enzymatically, or metabolically modified forms of a polynucleotide or nucleic acid.

[0074] A polynucleotide or nucleic acid sequence can be referred to as “isolated” in which it has been removed from its native environment. For example, a heterologous polynucleotide or nucleic acid encoding a polypeptide or polypeptide fragment having dihydroxy-acid dehydratase activity contained in a vector is considered isolated for the purposes of the present invention. Further examples of an isolated polynucleotide or nucleic acid include recombinant polynucleotides maintained in heterologous host cells or a purified (partially or substantially) polynucleotide or nucleic acid in solution. An isolated polynucleotide or nucleic acid according to the present invention further includes such molecules produced synthetically. An isolated polynucleotide or nucleic acid in the form of a polymer of DNA can be comprised of one or more segments of cDNA, genomic DNA or synthetic DNA.

[0075] The term “gene” refers to a nucleic acid or fragment thereof that is capable of being expressed as a specific protein, optionally including regulatory sequences preceding (5′ non-coding sequences) and following (3′ non-coding sequences) the coding sequence.

[0076] As used herein, the term “coding region” refers to a DNA sequence that codes for a specific amino acid sequence. “Suitable regulatory sequences” refer to nucleotide sequences located upstream (5′ non-coding sequences), within, or downstream (3′ non-coding sequences) of a coding sequence and that influence the transcription, RNA processing or stability, or translation of the associated coding sequence. Regulatory sequences can include promoters, translation leader sequences, introns, polyadenylation recognition sequences, RNA processing site, effector binding site, and stem-loop structure.

[0077] As used herein, the terms “polypeptide” is intended to encompass a singular “polypeptide” as well as plural “polypeptides” and fragments thereof, and refers to a molecule composed of monomers (amino acids) linearly linked by amide bonds (also known as peptide bonds). The term “polypeptide” refers to any chain or chains of two or more amino acids, and does not refer to a specific length of the product. Thus, peptides, dipeptides, tripeptides, oligopeptides, protein, amino acid chain, or any other term used to refer to a chain or chains of two or more amino acids, are included within the definition of “polypeptide,” and the term “polypeptide” can be used instead of, or interchangeably with any of these terms. A polypeptide can be derived from a natural biological source or produced by recombinant technology, but is not necessarily translated from a designated nucleic acid sequence. It can be generated in any manner, including by chemical synthesis.

[0078] By an “isolated” polypeptide or a fragment, variant, or derivative thereof is intended a polypeptide that is not in its natural milieu. No particular level of purification is required. For example, an isolated polypeptide can be removed from its native or natural environment. Recombinantly produced polypeptides and proteins expressed in host cells are considered isolated for purposes of the invention, as are native or recombinant polypeptides that have been separated, fractionated, or partially or substantially purified by any suitable technique.

[0079] As used herein, “native” refers to the form of a polynucleotide, gene or polypeptide as found in nature with its own regulatory sequences, if present.

[0080] As used herein, “endogenous” refers to the native form of a polynucleotide, gene or polypeptide in its natural location in the organism or in the genome of an organism. “Endogenous polynucleotide” includes a native polynucleotide in its natural location in the genome of an organism. “Endogenous gene” includes a native gene in its natural location in the genome of an organism. “Endogenous polypeptide” includes a native polypeptide in its natural location in the organism.

[0081] As used herein, “heterologous” refers to a polynucleotide, gene or polypeptide not normally found in the host organism but that is introduced into the host organism. “Heterologous polynucleotide” includes a native coding region, or portion thereof, that is reintroduced into the source organism in a form that is different from the corresponding native polynucleotide. “Heterologous gene” includes a native coding region, or portion thereof, that is reintroduced into the source organism in a form that is different from the corresponding native gene. For example, a heterologous gene can include a native coding region that is a portion of a chimeric gene including non-native regulatory regions that is reintroduced into the native host. “Heterologous polypeptide” includes a native polypeptide that is reintroduced into the source organism in a form that is different from the corresponding native polypeptide.

[0082] As used herein, the term “modification” refers to a change in a polynucleotide disclosed herein that results in reduced, substantially eliminated or eliminated activity of a polypeptide encoded by the polynucleotide, as well as a change in a polypeptide disclosed herein that results in reduced, substantially eliminated or eliminated activity of the polypeptide. Such changes can be made by methods well known in the art, including, but not limited to, deleting, mutating (e.g., spontaneous mutagenesis, random mutagenesis, mutagenesis caused by mutator genes, or transposon mutagenesis), substituting, inserting, down-regulating, altering the cellular location, altering the state of the polynucleotide or polypeptide (e.g., methylation, phosphorylation or ubiquitination), removing a cofactor, introduction of an antisense RNA/DNA, introduction of an interfering RNA/DNA, chemical modification, covalent modification, irradiation with UV or X-rays, homologous recombination, mitotic recombination, promoter replacement methods, and/or combinations thereof. Guidance in determining which nucleotides or amino acid residues can be modified, can be found by comparing the sequence of the particular polynucleotide or polypeptide with that of homologous polynucleotides or polypeptides, e.g., yeast or bacterial, and maximizing the number of modifications made in regions of high homology (conserved regions) or consensus sequences.

[0083] The term “derivative” as used herein, refers to a modification of a sequence disclosed in the present invention. Illustrative of such modifications would be the substitution, insertion, and/or deletion of one or more bases relating to a nucleic acid sequence of a coding sequence disclosed herein that preserve, slightly alter, or increase the function of a coding sequence disclosed herein in oil seed crop species. Such derivatives can be readily determined by one skilled in the art, for example, using computer modeling techniques for predicting and optimizing sequence structure. The term “derivative” thus also includes nucleic acid sequences having substantial sequence homology with the disclosed coding sequences herein such that they are able to have the disclosed functionalities for use in producing LC-PUFAs of the present invention.

[0084] As used herein, the term “variant” refers to a polypeptide differing from a specifically recited polypeptide of the invention by amino acid insertions, deletions, mutations, and substitutions, created using, e.g., recombinant DNA techniques, such as mutagenesis. Guidance in determining which amino acid residues can be replaced, added, or deleted without abolishing activities of interest, can be found by comparing the sequence of the particular polypeptide with that of homologous polypeptides and minimizing the number of amino acid sequence changes made in regions of high homology (conserved regions) or by replacing amino acids with consensus sequences.

[0085] Alternatively, recombinant polynucleotide variants encoding these same or similar polypeptides can be synthesized or selected by making use of the “redundancy” in the genetic code. Various codon substitutions, such as silent changes that produce various restriction sites, can be introduced to optimize cloning into a plasmid or viral vector for expression. Mutations in the polynucleotide sequence can be reflected in the polypeptide or domains of other peptides added to the polypeptide to modify the properties of any part of the polypeptide.

[0086] Amino acid “substitutions” can be the result of replacing one amino acid with another amino acid having similar structural and/or chemical properties, i.e., conservative amino acid replacements, or they can be the result of replacing one amino acid with an amino acid having different structural and/or chemical properties, i.e., non-conservative amino acid replacements. “Conservative” amino acid substitutions can be made on the basis of similarity in polarity, charge, solubility, hydrophobicity, hydrophilicity, or the amphipathic nature of the residues involved. For example, nonpolar (hydrophobic) amino acids include alanine, leucine, isoleucine, valine, proline, phenylalanine, tryptophan, and methionine; polar neutral amino acids include glycine, serine, threonine, cysteine, tyrosine, asparagine, and glutamine; positively charged (basic) amino acids include arginine, lysine, and histidine; and negatively charged (acidic) amino acids include aspartic acid and glutamic acid. Alternatively, “non-conservative” amino acid substitutions can be made by selecting the differences in polarity, charge, solubility, hydrophobicity, hydrophilicity, or the amphipathic nature of any of these amino acids. “Insertions” or “deletions” can be within the range of variation as structurally or functionally tolerated by the recombinant proteins. The variation allowed can be experimentally determined by systematically making insertions, deletions, or substitutions of amino acids in a polypeptide molecule using recombinant DNA techniques and assaying the resulting recombinant variants for activity.

[0087] The term “promoter” refers to a DNA sequence capable of controlling the expression of a coding sequence or functional RNA. In general, a coding sequence is located 3′ to a promoter sequence. Promoters can be derived in their entirety from a native gene, or be composed of different elements derived from different promoters found in nature, or even comprise synthetic DNA segments. It is understood by those skilled in the art that different promoters can direct the expression of a gene in different tissues or cell types, or at different stages of development, or in response to different environmental or physiological conditions. Promoters that cause a gene to be expressed in most cell types at most times are commonly referred to as “constitutive promoters.” It is further recognized that since in most cases the exact boundaries of regulatory sequences have not been completely defined, DNA fragments of different lengths can have identical promoter activity.

[0088] The term “operably linked” refers to the association of nucleic acid sequences on a single nucleic acid fragment so that the function of one is affected by the other. For example, a promoter is operably linked with a coding sequence when it is capable of affecting the expression of that coding sequence (e.g., that the coding sequence is under the transcriptional control of the promoter). Coding sequences can be operably linked to regulatory sequences in sense or antisense orientation.

[0089] The term “expression” as used herein, refers to the transcription and stable accumulation of sense (mRNA) or antisense RNA derived from the nucleic acid fragment of the invention. Expression can also refer to translation of mRNA into a polypeptide.

[0090] The term “overexpression” as used herein, refers to expression that is higher than endogenous expression of the same or related gene. A heterologous gene is overexpressed if its expression is higher than that of a comparable endogenous gene.

[0091] As used herein, the term “transformation” refers to the transfer of a nucleic acid or fragment into a host organism, resulting in genetically stable inheritance. Host organisms containing the transformed nucleic acid fragments are referred to as “transgenic” or “recombinant” or “transformed” organisms.

[0092] The terms “plasmid” and “vector” as used herein refer to an extra chromosomal element often carrying genes that are not part of the central metabolism of the cell, and usually in the form of circular double-stranded DNA molecules. Such elements can be autonomously replicating sequences, genome integrating sequences, phage or nucleotide sequences, linear or circular, of a single- or double-stranded DNA or RNA, derived from any source, in which a number of nucleotide sequences have been joined or recombined into a unique construction that is capable of introducing a promoter fragment and DNA sequence for a selected gene product along with appropriate 3′ untranslated sequence into a cell.

[0093] As used herein, the term “codon degeneracy” refers to the nature in the genetic code permitting variation of the nucleotide sequence without affecting the amino acid sequence of an encoded polypeptide. The skilled artisan is well aware of the “codon-bias” exhibited by a specific host cell in usage of nucleotide codons to specify a given amino acid. Therefore, when synthesizing a gene for improved expression in a host cell, it is desirable to design the gene such that its frequency of codon usage approaches the frequency of preferred codon usage of the host cell.

[0094] The term “codon-optimized” as it refers to genes or coding regions of nucleic acid molecules for transformation of various hosts refers to the alteration of codons in the gene or coding regions of the nucleic acid molecules to reflect the typical codon usage of the host organism without altering the polypeptide encoded by the DNA. Such optimization includes replacing at least one, more than one, or a significant number of codons with one or more codons that are more frequently used in the genes of that organism.

[0095] Deviations in the nucleotide sequence that comprise the codons encoding the amino acids of any polypeptide chain allow for variations in the sequence coding for the gene. Since each codon consists of three nucleotides, and the nucleotides comprising DNA are restricted to four specific bases, there are 64 possible combinations of nucleotides, 61 of which encode amino acids (the remaining three codons encode signals ending translation). The “genetic code” that shows which codons encode which amino acids are reproduced herein in the table below. As a result, many amino acids are designated by more than one codon. For example, the amino acids alanine and proline are coded for by four triplets, serine and arginine by six, whereas tryptophan and methionine are coded by just one triplet. This degeneracy allows for DNA base composition to vary over a wide range without altering the amino acid sequence of the proteins encoded by the DNA.

[0096] The Standard Genetic Code

| | T | C | A | G |
|---|---|---|---|---|
| T | TTT Phe (F) | TCT Ser (S) | TAT Tyr (Y) | TGT Cys (C) |
| | TTC ″ | TCC ″ | TAC ″ | TGC |
| | TTA Leu (L) | TCA ″ | TAA Stop | TGA Stop |
| | TTG ″ | TCG ″ | TAG Stop | TGG Trp (W) |
| C | CTT Leu (L) | CCT Pro (P) | CAT His (H) | CGT Arg (R) |
| | CTC ″ | CCC ″ | CAC ″ | CGC ″ |
| | CTA ″ | CCA ″ | CAA Gln (Q) | CGA ″ |
| | CTG ″ | CCG ″ | CAG ″ | CGG ″ |
| A | ATT Ile (I) | ACT Thr (T) | AAT Asn (N) | AGT Ser (S) |
| | ATC ″ | ACC ″ | AAC ″ | AGC ″ |
| | ATA ″ | ACA ″ | AAA Lys (K) | AGA Arg (R) |
| | ATG Met (M) | ACG ″ | AAG ″ | AGG ″ |
| G | GTT Val (V) | GCT Ala (A) | GAT Asp (D) | GGT Gly (G) |
| | GTC ″ | GCC ″ | GAC″ | GGC ″ |
| | GTA ″ | GCA ″ | GAA Glu (E) | GGA ″ |
| | GTG ″ | GCG ″ | GAG″ | GGG ″ |

[0097] Many organisms display a bias for use of particular codons to code for insertion of a particular amino acid in a growing peptide chain. Codon preference, or codon bias, differences in codon usage between organisms, is afforded by degeneracy of the genetic code, and is well documented among many organisms. Codon bias often correlates with the efficiency of translation of messenger RNA (mRNA), which is in turn believed to be dependent on, inter alia, the properties of the codons being translated and the availability of particular transfer RNA (tRNA) molecules. The predominance of selected tRNAs in a cell is generally a reflection of the codons used most frequently in peptide synthesis. Accordingly, genes can be tailored for optimal gene expression in a given organism based on codon optimization.

[0098] Given the large number of gene sequences available for a wide variety of animal, plant and microbial species, it is possible to calculate the relative frequencies of codon usage. Codon usage tables are readily available and can be adapted in a number of ways. See Nakamura et al., Nucl. Acids Res. 28:292 (2000). By utilizing this or similar tables, one of ordinary skill in the art can apply the frequencies to any given polypeptide sequence, and produce a nucleic acid fragment of a codon-optimized coding region that encodes the polypeptide, but uses codons optimal for a given species. The present invention pertains to codon optimized forms of OrfA, OrfB, chimeric OrfC, PPTase and/or other accessory proteins of the invention, as described further herein.

[0099] The term “percent identity” as known in the art, is a relationship between two or more polypeptide sequences or two or more polynucleotide sequences, as determined by comparing the sequences. In the art, “identity” also means the degree of sequence relatedness between polypeptide or polynucleotide sequences, as the case can be, as determined by the match between strings of such sequences. “Identity” and “similarity” can be readily calculated by known methods, including but not limited to those disclosed in: 1) Computational Molecular Biology (A. M. Lesk, Ed.) Oxford University: NY (1988); 2) Biocomputing: Informatics and Genome Projects (D. W. Smith, Ed.) Academic: NY (1993); 3) Computer Analysis of Sequence Data, Part I (A. M. Griffin and H. G. Griffin, Eds.) Humania: NJ (1994); 4) Sequence Analysis in Molecular Biology (G. von Heinje, Ed.) Academic (1987); and 5) Sequence Analysis Primer (M. Gribskov and J. Devereux, Eds.) Stockton: NY (1991).

[0100] Methods to determine identity are designed to give the best match between the sequences tested. Methods to determine identity and similarity are codified in publicly available computer programs. Sequence alignments and percent identity calculations can be performed, for example, using the AlignX program of the Vector NTI® suite (Invitrogen, Carlsbad, Calif.) or MEGALIGN™ program of the LASERGENE® bioinformatics computing suite (DNASTAR, Inc., Madison, Wis.). Multiple alignment of the sequences is performed using the “Clustal method of alignment,” which encompasses several varieties of the algorithm including the “Clustal V method of alignment” corresponding to the alignment method labeled Clustal V (disclosed by Higgins and Sharp, CABIOS. 5:151-153 (1989); D. G. Higgins, et al., Comput. Appl. Biosci., 8:189-191 (1992)) and found in the MEGALIGN™ program of the LASERGENE® bioinformatics computing suite (DNASTAR, Inc.). For multiple alignments, the default values correspond to GAP PENALTY=10 and GAP LENGTH PEN ALT Y=10. Default parameters for pairwise alignments and calculation of percent identity of protein sequences using the Clustal method are KTUPLE-T, GAP PENALTY-3, WTNDOW=5 and DIAGONALS SAVED=5. For nucleic acids these parameters are KTUPLE-2, GAP PENALTY-5, WINDOW=4 and DIAGONALS SAVED=4. After alignment of the sequences using the Clustal V program, it is possible to obtain a “percent identity” by viewing the “sequence distances” table in the same program. Additionally the “Clustal W method of alignment” is available and corresponds to the alignment method labeled Clustal W (described by Higgins and Sharp, CABIOS. 5:151-153 (1989); D. G. Higgins, et al., Comput. Appl. Biosci. 8:189-191 (1992)) and found in the MEGALIGN™ v6.1 program of the LASERGENE® bioinformatics computing suite (DNASTAR, Inc.). Default parameters for multiple alignment (GAP PENALTY™ 10, GAP LENGTH PENALTY=0.2, Delay Divergen Seqs(%)=30, DNA Transition Weight=0.5, Protein Weight Matrix=Gonnet Series, DNA Weight Matrix=IUB). After alignment of the sequences using the Clustal W program, it is possible to obtain a “percent identity” by viewing the “sequence distances” table in the same program.

[0101] The term “sequence analysis software” refers to any computer algorithm or software program that is useful for the analysis of nucleotide or amino acid sequences. “Sequence analysis software” can be commercially available or independently developed. Typical sequence analysis software will include, but is not limited to: 1.) the GCG suite of programs (Wisconsin Package Version 9.0, Genetics Computer Group (GCG), Madison, Wis.); 2.) BLASTP, BLASTN, BLASTX (Altschul et al., J. Mol. Biol., 215:403-410 (1990)); 3.) DNASTAR® (DNASTAR, Inc. Madison, Wis.); 4.) SEQUENCHER® (Gene Codes Corporation, Ann Arbor, Mich.); and 5.) the FASTA program incorporating the Smith-Waterman algorithm (W. R. Pearson, Comput. Methods Genome Res., [Proc. Int. Symp.] (1994), Meeting Date 1992, 11 1-20. Editor(s): Suhai, Sandor. Plenum: New York, N.Y.). Within the context of this application it will be understood that where sequence analysis software is used for analysis, that the results of the analysis will be based on the “default values” of the program referenced, unless otherwise specified. As used herein “default values” will mean any set of values or parameters that originally load with the software when first initialized.

[0102] Standard recombinant DNA and molecular cloning techniques used here are well known in the art and are described, e.g., by Sambrook et al., Molecular Cloning: A Laboratory Manual, Third Edition, Cold Spring Harbor Laboratory Press, Cold Spring Harbor, N.Y. (2000); and by Silhavy et al., Experiments with Gene Fusions, Cold Spring Harbor Laboratory Press, Cold Spring Harbor, N.Y. (1984); and by Ausubel et al., Current Protocols in Molecular Biology, published by Greene Publishing Assoc. and Wiley-Interscience (1987 to present).

[0103] The genetic manipulations of a recombinant hosts disclosed herein can be performed using standard genetic techniques and screening and can be made in any host cell that is suitable to genetic manipulation. In some embodiments, a recombinant host can be, but is not limited to, any higher plant, including both dicotyledonous and monocotyledonous plants, and consumable plants, including crop plants and plants used for their oils. Thus, any plant species or plant cell can be selected as described further below.

[0104] The oils of the present invention can also be used in non-culinary or dietary processes and compositions. Some of these uses can be industrial, cosmetic or medical. Oils of the present invention can also be used in any application for which the oils of the present invention are suited. In general, the oils of the present invention can be used to replace, e.g., mineral oils, esters, fatty acids, or animal fats in a variety of applications, such as lubricants, lubricant additives, metal working fluids, hydraulic fluids and fire resistant hydraulic fluids. The oils of the present invention can also be used as materials in a process of producing modified oils. Examples of techniques for modifying oils of the present invention include fractionation, hydrogenation, alteration of the oil's oleic acid or linolenic acid content, and other modification techniques known to those of skill in the art.

[0105] Examples of cosmetic uses for oils of the present invention include use as an emollient in a cosmetic composition; as a petroleum jelly replacement; as comprising part of a soap, or as a material in a process for producing soap; as comprising part of an oral treatment solution; as comprising part of an ageing treatment composition; and as comprising part of a skin or hair aerosol foam preparation.

[0106] Additionally, the oils of the present invention can be used in medical applications. For example, oils of the present invention can be used in a protective barrier against infection, and oils high in omega-9 fatty acids can be used to enhance transplant graft survival (U.S. Pat. No. 6,210,700).

[0107] It should be understood that the foregoing are non-limiting examples of non-culinary uses for which the oils of the present invention are suited. As previously stated, oils and modified oils of the present invention can be used to replace, e.g., mineral oils, esters, fatty acids, or animal fats in all applications known to those of skill in the art.

### PUFA Synthase

[0108] The “standard” or “classical” pathway for synthesis of long chain PUFAs (LC-PUFAs) in eukaryotic organisms involves the elongation and desaturation of medium chain-length saturated or mono-unsaturated fatty acids and has been described. The pathway for synthesis of long chain PUFAs via a PUFA synthase has also been described and is very different from the “standard” pathway. Specifically, PUFA synthases utilize malonyl-CoA as a carbon source and produce the final PUFA without releasing intermediates in any significant amount. Also, with PUFA synthases, the appropriate cis double bonds are added during the synthesis using a mechanism that does not require oxygen. In some embodiments, NADPH is used as a reductant during the synthesis cycles.

[0109] The present invention relates to host organisms (e.g., plants such as soybean) that have been genetically modified to express a PUFA synthase (either endogenously or by genetic manipulation). In some embodiments, an organism that has been genetically modified to express a PUFA synthase, wherein the organism does not naturally (endogenously, without genetic modification) express such an enzyme, or at least that particular PUFA synthase or portion thereof with which the organism is being genetically modified, can be referred to herein as a “heterologous” host organism with regard to the modification of the organism with the PUFA synthase or with another protein that is not endogenously expressed by the organism. The genetic modifications of the present invention can be used to improve PUFA production in a host organism that endogenously expresses a PUFA synthase, where the organism is not further modified with a different PUFA synthase or a portion thereof.

[0110] A PUFA synthase according to the present invention can comprise several multifunctional proteins (and can include single function proteins, particularly for PUFA synthase from marine bacteria) that can act together to conduct both iterative processing of the fatty acid chain as well as non-iterative processing, including trans-cis isomerization and enoyl reduction reactions in selected cycles. These proteins can also be referred to herein as the core PUFA synthase enzyme complex or the core PUFA synthase. The general functions of the domains and motifs contained within these proteins are individually known in the art and have been described in detail with regard to various PUFA synthases from marine bacteria and eukaryotic organisms (see, e.g., U.S. Pat. No. 6,140,486; U.S. Pat. No. 6,566,583; Metz et al., Science 293:290-293 (2001); U.S. Appl. Pub. No. 2002/0194641, now U.S. Pat. No. 7,247,461, issued Jul. 24, 2007; U.S. Appl. Pub. No. 2004/0235127, now U.S. Pat. No. 7,211,418, issued May 1, 2007; U.S. Appl. Pub. No. 2005/0100995, now U.S. Pat. No. 7,217,856, issued May 15, 2007; and WO 2006/135866). The domains can be found as a single protein (e.g., the domain and protein are synonymous) or as one of two or more (multiple) domains in a single protein, as mentioned above. The domain architecture of various PUFA synthases from marine bacteria and members of Thraustochytrium, and the structural and functional characteristics of genes and proteins comprising such PUFA synthases, have been described (see, e.g., U.S. Pat. No. 6,140,486; U.S. Pat. No. 6,566,583; Metz et al., Science 293:290-293 (2001); U.S. Appl. Pub. No. 2002/0194641, now U.S. Pat. No. 7,247,461, issued Jul. 24, 2007; U.S. Appl. Pub. No. 2004/0235127, now U.S. Pat. No. 7,211,418, issued May 1, 2007; U.S. Appl. Pub. No. 2005/0100995, now U.S. Pat. No. 7,217,856, issued May 15, 2007; and WO 2006/135866).

[0111] Numerous examples of polynucleotides, genes and polypeptides having PUFA synthase activity are known in the art and can be used in a genetically modified host disclosed herein. PUFA synthase proteins or domains that are useful in the present invention can include both bacterial and non-bacterial PUFA synthases. A non-bacterial PUFA synthase is a system that is from or derived from an organism that is not a bacterium, such as a eukaryote. Bacterial PUFA synthases are described, for example, in U.S. Appl. Pub. No. 2008/0050505, now U.S. Pat. No. 7,868,228, issued Jan. 11, 2011. Genetically modified plants of the invention can be produced that incorporate non-bacterial PUFA synthase functional domains with bacterial PUFA synthase functional domains, as well as PUFA synthase functional domains or proteins from other PKS systems (Type I iterative or modular, Type II, or Type III) or FAS systems.

[0112] In some embodiments, a PUFA synthase of the present invention comprises at least the following biologically active domains that are typically contained on three, four, or more proteins: (a) at least one enoyl-ACP reductase (ER) domain; (b) multiple acyl carrier protein (ACP) domain(s) (e.g., at least from one to four, or at least five ACP domains, and in some embodiments up to six, seven, eight, nine, ten, or more than ten ACP domains); (c) at least two β-ketoacyl-ACP synthase (KS) domains; (d) at least one acyltransferase (AT) domain; (e) at least one β-ketoacyl-ACP reductase (KR) domain; (f) at least two FabA-like β-hydroxyacyl-ACP dehydrase (DH) domains; (g) at least one chain length factor (CLF) domain; and/or (h) at least one malonyl-CoA:ACP acyltransferase (MAT) domain. In some embodiments, a PUFA synthase according to the present invention also comprises at least one region containing a dehydratase (DH) conserved active site motif.

[0113] In some embodiments, a PUFA synthase comprises at least the following biologically active domains: (a) at least one enoyl-ACP reductase (ER) domain; (b) at least five acyl carrier protein (ACP) domains; (c) at least two β-ketoacyl-ACP synthase (KS) domains; (d) at least one acyltransferase (AT) domain; (e) at least one β-ketoacyl-ACP reductase (KR) domain; (f) at least two FabA-like β-hydroxyacyl-ACP dehydrase (DH) domains; (g) at least one chain length factor (CLF) domain; and (h) at least one malonyl-CoA:ACP acyltransferase (MAT) domain. In some embodiments, a PUFA synthase according to the present invention also comprises at least one region or domain containing a dehydratase (DH) conserved active site motif that is not a part of a FabA-like DH domain. The structural and functional characteristics of each of these domains are described in detail in U.S. Appl. Pub. No. 2002/0194641, now U.S. Pat. No. 7,247,461, issued Jul. 24, 2007; U.S. Appl. Pub. No. 2004/0235127, now U.S. Pat. No. 7,211,418, issued May 1, 2007; U.S. Appl. Pub. No. 2005/0100995, now U.S. Pat. No. 7,217,856, issued May 15, 2007; U.S. Appl. Pub. No. 2007/0245431; and WO 2006/135866.

[0114] There are three open reading frames that form the core Schizochytrium PUFA synthase and that have been described previously, e.g., in U.S. Appl. Pub. No. 2007/0245431. The domain structure of each open reading frame is as follows.

[0115] Schizochytrium Open Reading Frame A (OrfA or Pfa1):

[0116] OrfA is a 8730 nucleotide sequence (not including the stop codon) that encodes a 2910 amino acid sequence. Within OrfA, there are twelve domains: (a) one β-keto acyl-ACP synthase (KS) domain; (b) one malonyl-CoA:ACP acyltransferase (MAT) domain; (c) nine acyl carrier protein (ACP) domains; and (d) one ketoreductase (KR) domain. Genomic DNA clones (plasmids) encoding OrfA from both Schizochytrium sp. ATCC 20888 and a daughter strain of ATCC 20888, denoted Schizochytrium sp., strain N230D, have been isolated and sequenced.

[0117] Genomic clone pJK1126 (denoted pJK1126 OrfA genomic clone, in the form of an E. coli plasmid vector containing “OrfA” gene from Schizochytrium ATCC 20888) was deposited with the American Type Culture Collection (ATCC), 10801 University Boulevard, Manassas, Va. 201 10-2209 USA on Jun. 8, 2006, and assigned ATCC Accession No. PTA-7648.

[0118] Genomic clone pJK306 (denoted pJK306 OrfA genomic clone, in the form of an E. coli plasmid containing 5′ portion of OrfA gene from Schizochytrium sp. N230D (2.2 kB overlap with pJK320)) was deposited with the American Type Culture Collection (ATCC), 10801 University Boulevard, Manassas, Va. 20110-2209 USA on Jun. 8, 2006, and assigned ATCC Accession No. PTA-7641.

[0119] Genomic clone pJK320 (denoted pJK320 OrfA genomic clone, in the form of an E. coli plasmid containing 3′ portion of OrfA gene from Schizochytrium sp. N230D (2.2 kB overlap with pJK306)) was deposited with the American Type Culture Collection (ATCC), 10801 University Boulevard, Manassas, Va. 201 10-2209 USA on Jun. 8, 2006, and assigned ATCC Accession No. PTA-7644.

[0120] Schizochytrium Open Reading Frame B (OrfB or Pfa2):

[0121] OrfB is a 6177 nucleotide sequence (not including the stop codon) that encodes a 2059 amino acid sequence. Within OrfB, there are four domains: (a) one-keto acyl-ACP synthase (KS) domain; (b) one chain length factor (CLF) domain; (c) one acyl transferase (AT) domain; and, (d) one enoyl ACP-reductase (ER) domain. Genomic DNA clones (plasmids) encoding OrfB from both Schizochytrium sp. ATCC 20888 and a daughter strain of ATCC 20888, denoted Schizochytrium sp., strain N230D, have been isolated and sequenced.

[0122] Genomic clone pJK1129 (denoted pJK1129 OrfB genomic clone, in the form of an E. coli plasmid vector containing “OrfB” gene from Schizochytrium ATCC 20888) was deposited with the American Type Culture Collection (ATCC), 10801 University Boulevard, Manassas, Va. 20110-2209 USA on Jun. 8, 2006, and assigned ATCC Accession No. PTA-7649.

[0123] Genomic clone pJK324 (denoted pJK324 OrfB genomic clone, in the form of an E. coli plasmid containing the OrfB gene sequence from Schizochytrium sp. N230D) was deposited with the American Type Culture Collection (ATCC), 10801 University Boulevard, Manassas, Va. 20110-2209 USA on Jun. 8, 2006, and assigned ATCC Accession No. PTA-7643.

[0124] Schizochytrium Open Reading Frame C (OrfC or Pfa3):

[0125] OrfC is a 4506 nucleotide sequence (not including the stop codon) that encodes a 1502 amino acid sequence. Within OrfC, there are three domains: (a) two FabA-like-hydroxy acyl-ACP dehydrase (DH) domains; and (b) one enoyl ACP-reductase (ER) domain. Genomic DNA clones (plasmids) encoding OrfC from both Schizochytrium sp. ATCC 20888 and a daughter strain of ATCC 20888, denoted Schizochytrium sp., strain N230D, have been isolated and sequenced.

[0126] Genomic clone pJK1131 (denoted pJK1131 OrfC genomic clone, in the form of an E. coli plasmid vector containing “OrfC” gene from Schizochytrium ATCC 20888) was deposited with the American Type Culture Collection (ATCC), 10801 University Boulevard, Manassas, Va. 201 10-2209 USA on Jun. 8, 2006, and assigned ATCC Accession No. PTA-7650.

[0127] Genomic clone pBR002 (denoted pBR002 OrfC genomic clone, in the form of an E. coli plasmid vector containing the OrfC gene sequence from Schizochytrium sp. N230D) was deposited with the American Type Culture Collection (ATCC), 10801 University Boulevard, Manassas, Va. 20110-2209 USA on Jun. 8, 2006, and assigned ATCC Accession No. PTA-7642.

[0128] In addition, there are three open reading frames that form the core Thraustochytrium PUFA synthase that have been described previously. The domain structure of each open reading frame is as follows.

[0129] Thraustochytrium 23 Open Reading Frame A (OrfA):

[0130] OrfA is a 8433 nucleotide sequence (not including the stop codon) that encodes a 281 1 amino acid sequence. The following domains are present in Th. 23B OrfA: (a) one β-ketoacyl-ACP synthase (KS) domain; (b) one malonyl-CoA:ACP acyltransferase (MAT) domain; (c) eight acyl earner protein (ACP) domains; and (d) one β-ketoacyl-ACP reductase (R) domain.

[0131] Genomic clone Th23BOrfA_pBR812.1 (denoted Th23BOrfA_pBR812.1 genomic clone, in the form of an E. coli plasmid vector containing the OrfA gene sequence from Thraustochytrium 23 B) was deposited with the American Type Culture Collection (ATCC), University Boulevard, Manassas, Va. 201 10-2209 USA on Mar. 1, 2007, and assigned ATCC Accession No. PTA-8232. Genomic clone Th23BOrfA_pBR811 (denoted Th23BOrfA_pBR811 genomic clone, in the form of an E. coli plasmid vector containing the OrfA gene sequence from Thraustochytrium 23B) was deposited with the American Type Culture Collection (ATCC), 10801 University Boulevard, Manassas, Va. 201 10-2209 USA on Mar. 1, 2007, and assigned ATCC Accession No. PTA-8231.

[0132] Thraustochytrium 23B Open Reading Frame B (OrfB):

[0133] OrfB is a 5805 nucleotide sequence (not including the stop codon) that encodes a 1935 amino acid sequence. The following domains are present in Th. 23B OrfB: (a) one β-ketoacyl-ACP synthase (KS) domain; (b) one chain length factor (CLF) domain; (c) one acyltransferase (AT) domain; and, (d) one enoyl-ACP reductase (ER) domain. Genomic clone Th23BOrfB_pBR800 (denoted Th23BOrfB_pBR800 genomic clone, in the form of an E. coli plasmid vector containing the OrfB gene sequence from Thraustochytrium 23 B) was deposited with the American Type Culture Collection (ATCC), 10801 University Boulevard, Manassas, Va. 20110-2209 USA on Mar. 1, 2007, and assigned ATCC Accession No. PTA-8227.

[0134] Thraustochytrium 23B Open Reading Frame C (OrfC):

[0135] OrfC is a 4410 nucleotide sequence (not including the stop codon) that encodes a 1470 amino acid sequence. The following domains are present in Th. 23B OrfC: (a) two FabA-like β-hydroxyacyl-ACP dehydrase (DH) domains, both with homology to the FabA protein (an enzyme that catalyzes the synthesis of trans-2-decenoyl-ACP and the reversible isomerization of this product to cis-3-decenoyl-ACP); and (b) one enoyl-ACP reductase (ER) domain with high homology to the ER domain of Schizochytrium OrfB. Genomic clone Th23BOrfC_pBR709A (denoted Th23BOrfC_pBR709A genomic clone, in the form of an E. coli plasmid vector containing the OrfC gene sequence from Thraustochytrium 23B) was deposited with the American Type Culture Collection (ATCC), 10801 University Boulevard, Manassas, Va. 201 10-2209 USA on Mar. 1, 2007, and assigned ATCC Accession No. PTA-8228.

[0136] Chimeric or Hybrid PUFA Synthase:

[0137] In some embodiments, the PUFA synthase comprises domains selected from any of those described herein, wherein the domains are combined (e.g., mixed and matched) to form a complete PUFA synthase meeting the minimum requirements described herein. In some embodiments, the genetically modified organism of the invention can be further modified with at least one domain or biologically active fragment thereof of another PUFA synthase. In some embodiments, any of the domains of a PUFA synthase can be modified from their natural structure to modify or enhance the function of that domain in the PUFA synthase system (e.g., to modify the PUFA types or ratios thereof produced by the system). Such mixing of domains to produce chimeric PUFA synthase is described in the patents and publications referenced herein.

[0138] In some embodiments, the PUFA synthase comprises a Schizochytrium PUFA synthase wherein OrfC from the Schizochytrium PUFA synthase is replaced with OrfC from Thraustochytrium 23B. In some embodiments, such a chimeric OrfC from Thraustochytrium 23B is encoded by a nucleic acid sequence that is optimized for Schizochytrium codon usage. As a non-limiting example of such a chimeric OrfC, plasmid pThOrfC-synPS (denoted pThOrfC-synPS, in the form of an E. coli plasmid vector containing a “perfect stitch” synthetic Thraustochytrium 23 B PUFA PKS OrfC codon optimized for expression in Schizochytrium or other heterologous hosts) was deposited with the American Type Culture Collection (ATCC), 10801 University Boulevard, Manassas, Va. 201 10-2209 USA on Mar. 1, 2007, and assigned ATCC Accession No. PTA-8229 (see also U.S. Appl. Pub. No. 2008/0022422, now U.S. Pat. No. 8,003,772, issued Aug. 23, 2011).

[0139] Other examples of PUFA synthase genes and polypeptides that can be used in a genetically modified organism of the invention include, but are not limited to, the following codon-optimized sequences generated by the methods described further herein: SEQ ID NO:1 (SzPUFA OrfA v3 protein); SEQ ID NO:2 (SzPUFA OrfB v3 protein); SEQ ID NO:3 (hSzThPUFA OrfC v3 protein); SEQ ID NO:6 (SzPUFA OrfA gene); SEQ ID NO:7 (SzPUFA OrfB v3 gene); and SEQ ID NO:8 (hSzThPUFA OrfC v3 gene), as well as an active variant, portion, fragment, or derivative of such sequences, wherein such a gene encodes, or such a polypeptide or protein has, PUFA synthase activity. The present invention includes an isolated polynucleotide or polypeptide comprising or consisting of one or more of such sequences.

[0140] Other examples of PUFA synthase genes and polypeptides that can be used in the invention include, but are not limited to, PUFA synthase genes or polypeptides having at least 80%, at least 85%, at least 90%, at least 95%, at least 96%, at least 97%, at least 98%, at least 99% or 100% sequence identity to any one of the PUFA synthase genes or polypeptides described herein. Useful ranges can be selected between any of these values (for example, 80% to 100% identical, 85% to 100% identical, 90% to 100% identical, 95% to 100% identical, 80% to 99% identical, 85% to 99% identical, 90% to 99% identical, or 95% to 99% identical). Still other examples of PUFA synthase genes and polypeptides that can used in a genetically modified organism of the invention include, but are not limited to an active variant, portion, fragment of derivative of any one of the PUFA synthases or sequences described herein, wherein such a gene encodes, or such a polypeptide has, PUFA synthase activity.

[0141] In some embodiments, the PUFA synthase can be an algal PUFA synthase. In some embodiments, the PUFA synthase can comprise an amino acid sequence that is 80% to 100% identical, 85% to 100% identical, 90% to 100% identical, 95% to 100% identical, 80% to 99% identical, 85% to 99% identical, 90% to 99% identical, or 95% to 99% identical to the amino acid sequence of SEQ ID NO:1. In some embodiments, the PUFA synthase can comprise the amino acid sequence of SEQ ID NO:1. In some embodiments, the nucleic acid sequence encoding the PUFA synthase can comprise a nucleic acid sequence 80% to 100% identical, 85% to 100% identical, 90% to 100% identical, 95% to 100% identical, 80% to 99% identical, 85% to 99% identical, 90% to 99% identical, or 95% to 99% identical to the nucleic acid sequence of SEQ ID NO:6. In some embodiments, the nucleic acid sequence encoding the PUFA synthase can comprise the nucleic acid sequence of SEQ ID NO:6. In some embodiments, the PUFA synthase can comprise an amino acid sequence that is at least 80%, at least 85%, at least 90%, at least 95%, at least 96%, at least 97%, at least 98%, or at least 99% identical to the amino acid sequence of SEQ ID NO:2. In some embodiments, the PUFA synthase can comprise the amino acid sequence of SEQ ID NO:2. In some embodiments, the nucleic acid sequence encoding the PUFA synthase can comprise a nucleic acid sequence that is at least 80%, at least 85%, at least 90%, at least 95%, at least 96%, at least 97%, at least 98%, or at least 99% identical to the nucleic acid sequence of SEQ ID NO:7. in some embodiments, the nucleic acid sequence encoding the PUFA synthase can comprise the nucleic acid sequence of SEQ ID NO:7. In some embodiments, the PUFA synthase can comprise an amino acid sequence that is at least 80%, at least 85%, at least 90%, at least 95%, at least 96%, at least 97%, at least 98%, or at least 99% identical to the amino acid sequence of SEQ ID NO:3. In some embodiments, the PUFA synthase comprises the amino acid sequence of SEQ ID NO:3. In some embodiments, the nucleic acid sequence encoding the PUFA synthase comprises a nucleic acid sequence that is at least 80%, at least 85%, at least 90%, at least 95%, at least 96%, at least 97%, at least 98%, or at least 99% identical to the nucleic acid sequence of SEQ ID NO:8. In some embodiments, the nucleic acid sequence encoding the PUFA synthase comprises the nucleic acid sequence of SEQ ID NO:8.

[0142] In some embodiments, the PUFA synthase comprises the amino acid sequence of SEQ ID NO:1, 2, or 3 or any combinations thereof. In some embodiments, the PUFA synthase comprises the nucleic acid sequence of SEQ ID NO:6, 7, or 8 or any combinations thereof. In some embodiments, the nucleic acid sequence encodes an amino acid sequence of SEQ ID NO:1, 2, or 3, or any combinations or percent identities thereof described herein.

[0143] In some embodiments, the sequences of other PUFA synthase genes and/or polypeptides can be identified in the literature and in bioinformatics databases well known to the skilled person using sequences disclosed herein and available in the art. For example, such sequences can be identified through BLAST searching of publicly available databases with known PUFA synthase gene or polypeptide sequences. In such a method, identities can be based on the Clustal W method of alignment using the default parameters of GAP PEN ALT Y=10, GAP LENGTH PENALTY—0.1, and Gonnet 250 series of protein weight matrix.

[0144] Additionally, the PUFA synthase gene or polypeptide sequences disclosed herein or known the art can be used to identify other PUFA synthase homologs in nature. For example, each of the PUFA synthase nucleic acid fragments disclosed herein can be used to isolate genes encoding homologous proteins. Isolation of homologous genes using sequence-dependent protocols is well known in the art. Examples of sequence-dependent protocols include, but are not limited to (1) methods of nucleic acid hybridization; (2) methods of DNA and RNA amplification, as exemplified by various uses of nucleic acid amplification technologies (e.g., polymerase chain reaction (PCR), Mullis et al., U.S. Pat. No. 4,683,202; ligase chain reaction (LCR), S. Tabor, et al., Proc. Acad. Sci. USA 82:1074 (1985); or strand displacement amplification (SDA), Walker et al., Proc. Natl. Acad. Sci. U.S.A., 89:392 (1992)); and (3) methods of library construction and screening by complementation.

[0145] All of these methods can be readily practiced by one skilled in the art making use of the known or identified sequences encoding target proteins. In some embodiments, DNA sequences surrounding a target PUFA synthase coding sequence are also useful in some modification procedures and can be readily found by one of skill in the art in publicly available databases. Methods for creating genetic mutations are common and well known in the art and can be applied to the exercise of creating mutants.

### Phosphopantethienyl Transferase

[0146] The phosphopantethienyl transferases (PPTases) are a family of enzymes that have been well characterized in fatty acid synthesis, polyketide synthesis, and non-ribosomal peptide synthesis. In particular, the ACP domains present in the PUFA synthase enzymes require activation by attachment of a cofactor (4-phosphopantetheine) from coenzyme A to the acyl carrier protein (ACP). Attachment of this cofactor is carried out by PPTases. If the endogenous PPTases of the host organism are incapable of activating the PUFA synthase ACP domains, then it is necessary to provide a PPTase that is capable of carrying out that function. The sequences of many PPTases are known, and crystal structures have been determined (e.g., Reuter et al., EMBO J. 18:6823-31 (1999)) as well as mutational analysis of amino acid residues important for activity (Mofid et al., Biochemistry 43:4128-36 (2004)).

[0147] One example of a heterologous PPTase that has been demonstrated previously to recognize the OrfA ACP domains described herein as substrates is the Het I protein of Nostoc sp. PCC 7120 (formerly called Anabaena sp. PCC 7120). Het I is present in a cluster of genes in Nostoc known to be responsible for the synthesis of long chain hydroxy-fatty acids that are a component of a glyco-lipid layer present in heterocysts of that organism (Black and Wolk, J. Bacteriol. 775:2282-2292 (1994); Campbell et al., Arch. Microbiol. 7(57:251-258 (1997)). Het I is likely to activate the ACP domains of a protein, Hgl E, present in that cluster. The two ACP domains of Hgl E have a high degree of sequence homology to the ACP domains found in Schizochytrium Orf A and other PUFA synthases.

[0148] In some embodiments, a PUFA synthase can be considered to include at least one 4′-phosphopantetheinyl transferase (PPTase) domain, or such a domain can be considered to be an accessory domain or protein to the PUFA synthase. Structural and functional characteristics of PPTases have been described in detail, for example, in U.S. Appl. Pub. No. 2002/0194641, now U.S. Pat. No. 7,247,461, issued Jul. 24, 2007; U.S. Appl. Pub. No. 2004/0235127, now U.S. Pat. No. 7,211,418, issued May 1, 2007; and U.S. Appl. Pub. No. 2005/0100995, now U.S. Pat. No. 7,217,856, issued May 15, 2007.

[0149] Numerous examples of genes and polypeptides having PPTase activity are known in the art and could be used in a genetically modified organism of the invention if they are capable of activating the ACP domains of the particular PUFA synthase being used. Examples of genes and polypeptides that can be used in a genetically modified organism of the invention can include, but are not limited to, the following codon-optimized sequences described further herein: SEQ ID NO:5 (NoHetI v3 protein) and SEQ ID NO:10 (NoHetI v3 gene).

[0150] Other examples of PPTase genes and polypeptides that can be used in a genetically modified organism of the invention include, but are not limited to, PPTase genes or polypeptides having at least 80%, at least 85%, at least 90%, at least 95%, at least 96%, at least 97%, at least 98%, at least 99% or 100% sequence identity to any one of the PPTases or sequences described herein. Useful ranges can be selected between any of these values (for example, 80% to 100% identical, 85% to 100% identical, 90% to 100% identical, 95% to 100% identical, 80% to 99% identical, 85% to 99% identical, 90% to 99% identical, or 95% to 99% identical). Still other examples of PPTase genes and polypeptides that can used in a genetically modified organism of the invention include, but are not limited to an active variant, fragment, portion or derivative of any one of the PPTase sequences described herein, wherein such a gene encodes, or such a polypeptide has, PPTase activity.

[0151] In some embodiments, the PPTase can be an algal PPTase. In some embodiments, the PPTase can comprise an amino acid sequence that is 80% to 100% identical, 85%>> to 100% identical, 90% to 100% identical, 95% to 100% identical, 80% to 99% identical, 85% to 99% identical, 90% to 99% identical, or 95% to 99% identical to the amino acid sequence of SEQ ID NO:5. In some embodiments, the PPTase can comprise the amino acid sequence of SEQ ID NO:5. In some embodiments, the nucleic acid sequence encoding the PPTase can comprise a nucleic acid sequence 80% to 100% identical, 85% to 100% identical, 90% to 100% identical, 95% to 100% identical, 80% to 99% identical, 85% to 99% identical, 90% to 99% identical, or 95% to 99% identical to the nucleic acid sequence of SEQ ID NO:10. In some embodiments, the nucleic acid sequence encoding the PPTase can comprise the nucleic acid sequence of SEQ ID NO:10. In some embodiments, the nucleic acid sequence encodes an amino acid sequence of SEQ ID NO:5 or any percent identities thereof described herein.

[0152] In some embodiments of the present invention, a PPTase can be provided for production and/or accumulation of PPTase in a heterologous host.

[0153] In some embodiments, a gene and/or polypeptide encoding PPTase can be used to identify another PPTase gene and/or polypeptide sequences and/or can be used to identify a PPTase homolog in other cells. Such PPTase encoding sequences can be identified, for example, in the literature and/or in bioinformatics databases well known to the skilled person. For example, the identification of a PPTase encoding sequence in another cell type using bioinformatics can be accomplished through BLAST (as disclosed above) searching of publicly available databases with a known PPTase encoding DNA and polypeptide sequence, such as any of those provided herein. Identities are based on the Clustal W method of alignment using the default parameters of GAP PENALTY=10, GAP LENGTH PENALTY=0.1, and Gonnet 250 series of protein weight matrix.

[0154] In some embodiments, the genetically modified plant (e.g., soybean), descendant, cell, tissue, or part thereof contains a PUFA synthase and a PPTase. In some embodiments, the genetically modified plant (e.g., soybean), descendant, cell, tissue, or part thereof contains the nucleic acid sequences of (i) and (ii) in a single recombinant expression vector. In some embodiments, the genetically modified plant (e.g., soybean), descendant, cell, tissue, or part thereof contains the nucleic acid sequences of (i) and (ii) in different recombinant expression vectors.

### Acyl-CoA Synthetase

[0155] The present invention provides acyl-CoA synthetase (ACoAS) proteins that catalyze the conversion of long chain PUFA free fatty acids (FFA) to acyl-CoA. The endogenous producer of PUFAs by PUFA synthase, Schizochytrium, possesses one or more ACoASs that are capable of converting the free fatty acid products of its PUFA synthase into acyl-CoA. Therefore, Schizochytrium, as well as other organisms that endogenously contain a PUFA synthase (e.g., other Thraustochytrids) or other organisms that can convert PUFA FFAs into acyl-CoAs (such as Thalassiosira pseudonana or Crypthecodinium cohnii), could represent sources for genes encoding enzymes that are useful in permitting or increasing the accumulation of the products of a PUFA synthase expressed in a heterologous host. Other ACoAS sequences have been described in U.S. Appl. Pub. No. 2007/0245431.

[0156] Numerous examples of genes and polypeptides having ACoAS activity are known in the art and can be used in a genetically modified organism of the invention. Examples of genes and polypeptides that can be used in a genetically modified organism of the invention can include, but are not limited to, the following codon-optimized sequences described further herein: SEQ ID NO:4 (SzACS-2 v3 protein) and SEQ ID NO:9 (hSzThACS-2 v3 gene).

[0157] Other examples of ACoAS genes and polypeptides that can be used in a genetically modified organism of the invention include, but are not limited to, ACoAS genes or polypeptides having at least 80%, at least 85%, at least 90%, at least 95%, at least 96%, at least 97%, at least 98%, at least 99% or 100% sequence identity to any one of the ACoAS or sequences described herein. Useful ranges can be selected between any of these values (for example, 80% to 100% identical, 85% to 100% identical, 90% to 100% identical, 95% to 100% identical, 80% to 99% identical, 85% to 99% identical, 90% to 99% identical, or 95% to 99% identical). Still other examples of ACoAS genes and polypeptides that can used in a genetically modified organism of the invention include, but are not limited to an active variant, fragment, portion, or derivative of any one of the ACoAS sequences described herein, wherein such a gene encodes, or such a polypeptide has, ACoAS activity.

[0158] In some embodiments, the ACoAS can be an algal ACoAS. In some embodiments, the ACoAS can comprise an amino acid sequence that is 80% to 100% identical, 85% to 100% identical, 90% to 100% identical, 95% to 100% identical, 80% to 99% identical, 85% to 99% identical, 90% to 99% identical, or 95% to 99% identical to the amino acid sequence of SEQ ID NO:4. In some embodiments, the ACoAS can comprise the amino acid sequence of SEQ ID NO:4. In some embodiments, the nucleic acid sequence encoding the ACoAS can comprise a nucleic acid sequence 80% to 99% identical, 85% to 99% identical, 90% to 99% identical, 80% to 95% identical, or 85% to 95% identical to the nucleic acid sequence of SEQ ID NO:9. In some embodiments, the nucleic acid sequence encoding the ACoAS can comprise the nucleic acid sequence of SEQ ID NO:9. In some embodiments, the nucleic acid sequence encoding the ACoAS comprises the nucleic acid sequence of SEQ ID NO:34. In some embodiments, the nucleic acid sequence encodes an amino acid sequence of SEQ ID NO:4 or any percent identity thereof described herein.

[0159] In some embodiments of the present invention, ACoAS can be provided for production and/or accumulation of ACoAS in a heterologous host as well as for improved production and/or accumulation of ACoAS in an endogenous host.

[0160] In some embodiments, a gene and/or polypeptide encoding ACoAS can be used to identify another ACoAS gene and/or polypeptide sequences and/or can be used to identify an ACoAS homolog in other cells. Such ACoAS encoding sequences can be identified, for example, in the literature and/or in bioinformatics databases well known to the skilled person. For example, the identification of a ACoAS encoding sequence in another cell type using bioinformatics can be accomplished through BLAST (as disclosed above) searching of publicly available databases with a known ACoAS encoding DNA and polypeptide sequence, such as any of those provided herein. Identities are based on the Clustal W method of alignment using the default parameters of GAP PENALTY=10, GAP LENGTH PENALTY=0.1, and Gonnet 250 series of protein weight matrix.

[0161] In some embodiments, the genetically modified plant (e.g., soybean), descendant, cell, tissue, or part thereof comprises a PUFA synthase and a ACoAS, or a PUFA synthase, a PPTase and a ACoAS. In some embodiments, the genetically modified plant (e.g., soybean), descendant, cell, tissue, or part thereof comprises the nucleic acid sequences of (i), (ii) or (iii), or any combinations thereof, contained in a single recombinant expression vector. In some embodiments, the nucleic acid sequences of (i), (ii) and (iii) are contained in different recombinant expression vectors. In some embodiments, the nucleic acid sequences of (i) and (ii) are contained in a single recombinant expression vector and the nucleic acid sequence of (iii) is contained in a different recombinant expression vector. In some embodiments, the nucleic acid sequences of (i) and (iii) are contained in a single recombinant expression vector and the nucleic acid sequence of (ii) is contained in a different recombinant expression vector. In some embodiments, the nucleic acid sequences of (ii) and (iii) are contained in a single recombinant expression vector and the nucleic acid sequence of (i) is contained in a different recombinant expression vector. In some embodiments, the nucleic acid sequences of (i), (ii) or (iii), or any combinations thereof, are under the control of one or more seed-specific promoters.

### Methods of Making Genetically Modified Organisms

[0162] To produce significantly high yields of one or more desired polyunsaturated fatty acids, a plant can be genetically modified to introduce a PUFA synthase into the plant. The present invention also relates to methods to improve or enhance the effectiveness of such genetic modification and particularly, to improve or enhance the production and/or accumulation of the end product of a PUFA synthase, e.g., PUFAs.

[0163] Methods for gene expression in a genetically modified organism, including, but not limited to plants, are known in the art. In some embodiments, the coding region for the PUFA synthase genes to be expressed can be codon optimized for the target host cell as described below. Expression of genes in recombinant host cells including, but not limited to, plant cells, can require a promoter operably linked to a coding region of interest, and/or a transcriptional terminator. A number of promoters can be used in constructing vectors for genes, including but not limited to a seed-specific promoter (e.g., PvDlec2, LfKCS3, FAE 1, BoACP, or BnaNapinC) or a leaf-specific promoter (e.g., ubiquitin or CsVMV). Other non-limiting examples of promoters that can be used in the present invention include the acyl carrier protein promoter disclosed in WO 1992/18634; the Phaseolus vulgaris beta-phaseolin promoter and truncated versions disclosed in Slightom et al. (Proc. Natl. Acad. Sci. U.S.A. 80: 1897-1901; 1983); Sengupta-Gopalan et al. (Proc. Nat. Acad. Sci. 82: 3320-3324; 1985); van der Geest et al. (Plant Mol. Biol. 33: 553-557; 1997), and Bustos et al. (EMBO J. 10: 1469-1479; 1991).

[0164] In some embodiments of the present invention, a recombinant vector is an engineered (e.g., artificially produced) nucleic acid molecule that is used as a tool for manipulating a nucleic acid sequence of choice and for introducing such a nucleic acid sequence into a host cell. The recombinant vector is therefore suitable for use in cloning, sequencing, and/or otherwise manipulating the nucleic acid sequence of choice, such as by expressing and/or delivering the nucleic acid sequence of choice into a host cell to form a recombinant cell. Such a vector typically contains heterologous nucleic acid sequences, that is nucleic acid sequences that are not naturally found adjacent to nucleic acid sequence to be cloned or delivered, although the vector can also contain regulatory nucleic acid sequences (e.g., promoters, untranslated regions) that are naturally found adjacent to nucleic acid molecules of the present invention or that are useful for expression of the nucleic acid molecules of the present invention. The vector can be either RNA or DNA, either prokaryotic or eukaryotic, and typically is a plasmid. The vector can be maintained as an extrachromosomal element (e.g., a plasmid) or it can be integrated into the chromosome of a recombinant organism (e.g., a microbe or a plant). The entire vector can remain in place within a host cell, or under certain conditions, the plasmid DNA can be deleted, leaving behind the nucleic acid molecule of the present invention. The integrated nucleic acid molecule can be under chromosomal promoter control, under native or plasmid promoter control, or under a combination of several promoter controls. Single or multiple copies of the nucleic acid molecule can be integrated into the chromosome. A recombinant vector of the present invention can contain at least one selectable marker.

[0165] In some embodiments, a recombinant vector used in a recombinant nucleic acid molecule of the present invention is an expression vector. In such embodiments, a nucleic acid sequence encoding the product to be produced (e.g., a PUFA synthase) is inserted into the recombinant vector to produce a recombinant nucleic acid molecule. The nucleic acid sequence encoding the protein to be produced is inserted into the vector in a manner that operatively links the nucleic acid sequence to regulatory sequences in the vector that enable the transcription and translation of the nucleic acid sequence within the recombinant host cell.

[0166] Vectors useful for the transformation of a variety of host organisms and cells are common and disclosed in the literature. Typically the vector contains a selectable marker and sequences allowing autonomous replication or chromosomal integration in the desired host. In addition, suitable vectors can comprise a promoter region that harbors transcriptional initiation controls and a transcriptional termination control region, between which a coding region DNA fragment can be inserted, to provide expression of the inserted coding region. Both control regions can be derived from genes homologous to the transformed host cell, although it is to be understood that such control regions can also be derived from genes that are not native to the specific species chosen as a production host.

[0167] The present invention includes the expression of one or more acyl-CoA synthetases as described and exemplified herein with a PUFA synthase as described herein and with an exogenous PPTase that are utilized alone or in combination with any one or more strategies described herein (e.g., any one, two, three, or four of: codon optimization, organelle-targeting, enhancement of PUFA synthase competition for malonyl CoA (e.g., by inhibition of FAS), and/or expression of one or more acyltransferases or related enzymes), to increase PUFA production and/or accumulation in a heterologous host.

[0168] Some embodiments of the invention relate to the targeting of expression of the PUFA synthase enzymes, the PPTase, and/or any one or more of the accessory proteins and/or targeted genetic modifications to one or more organelles of the host. For example, in some embodiments, expression of the PUFA synthase system and the PPTase can be targeted to the plastid of a plant. In some embodiments, expression of the PUFA synthase and the PPTase is targeted to the cytosol. In some embodiments, expression of the PUFA synthase and the PPTase is targeted to both the plastid and the cytosol of a plant. In any of these embodiments, other targets can be directed to the plastid or the cytosol.

[0169] In some embodiments, acyl-CoA synthetases are expressed in the cytosol to convert the DHA and/or other LC-PUFA free fatty acids to acyl-CoAs, which in turn can be utilized by the acyltransferases.

[0170] A variety of plastid targeting sequences are known in the art and can be used in embodiments where the heterologous host is a plant or plant cell, and wherein targeting to the plastid is desired.

[0171] The present invention includes the use of organelle targeting (e.g., to the plastid or chloroplast in plants) with expression of a PUFA synthase as described herein and with an exogenous PPTase, which are utilized alone or in combination with any one or more strategies described herein (e.g., any one, two, three, or four of: codon optimization, enhancement of PUFA synthase competition for malonyl CoA (e.g., by inhibition of FAS), expression of one or more acyl-CoA synthetases, and/or expression of one or more acyltransferases or related enzymes), to increase PUFA production and/or accumulation in a heterologous host.

[0172] The targeting of gene products to the plastid or chloroplast is controlled by a signal sequence found at the amino terminal end of various proteins, which is cleaved during import yielding the mature protein (e.g., with regard to chloroplast targeting, see, e.g., Comai et al., J. Biol. Chem. 263:15104-15109 (1988)). These signal sequences can be fused to heterologous gene products to effect the import of heterologous products into the chloroplast (van den Broeck et al. Nature 313:358-363 (1985)). DNA encoding for appropriate signal sequences can be isolated from the cDNAs encoding the RUBISCO protein, the CAB protein, the EPSP synthase enzyme, the GS2 protein and many other proteins that are known to be chloroplast localized.

[0173] In some embodiments of the invention, the localization of proteins employed in the invention is directed to a subcellular compartment, for example, to the plastid or chloroplast. Proteins can be directed to the chloroplast by including at their amino-terminus a chloroplast transit peptide (CTP). Similarly, proteins can be directed to the plastid by including at their N-terminus a plastid transit or signaling peptide.

[0174] Naturally occurring chloroplast targeted proteins, synthesized as larger precursor proteins containing an amino-terminal chloroplast targeting peptide directing the precursor to the chloroplast import machinery, are well known in the art. Chloroplast targeting peptides are generally cleaved by specific endoproteases located within the chloroplast organelle, thus releasing the targeted mature and can active enzyme from the precursor into the chloroplast milieu. Examples of sequences encoding peptides that are suitable for directing the targeting of the gene or gene product to the chloroplast or plastid of the plant cell include the petunia EPSPS CTP, the Arabidopsis EPSPS CTP2 and intron, and others known to those skilled in the art. Such targeting sequences provide for the desired expressed protein to be transferred to the cell structure in which it most effectively functions, or by transferring the desired expressed protein to areas of the cell in which cellular processes necessary for desired phenotypic function are concentrated. Specific examples of chloroplast targeting peptides are well known in the art and include the Arabidopsis thaliana ribulose bisphosphate carboxylase small subunit ats1A transit peptide, an Arabidopsis thaliana EPSPS transit peptide, and a Zea maize ribulose bisphosphate carboxylase small subunit transit peptide.

[0175] An optimized transit peptide is described, for example, by van den Broeck et al., Nature, 313:358-363 (1985). Prokaryotic and eukaryotic signal sequences are disclosed, for example, by Michaelis et al., Ann. Rev. Microbiol. 36:425 (1982). Additional examples of transit peptides that can be used in the invention include the chloroplast transit peptides such as those described in Von Heijne et al., Plant Mol. Biol. Rep. 9:104-126 (1991); Mazur et al., Plant Physiol. 85:1110 (1987); and Vorst et al., Gene 65:59 (1988). Chen & Jagendorf (J. Biol. Chem. 268:2363-2367 (1993)) have described use of a chloroplast transit peptide for import of a heterologous transgene. This peptide used is the transit peptide from the rbcS gene from Nicotiana plumbaginifolia (Poulsen et al., Mol. Gen. Genet. 205: 193-200 (1986)). One CTP that has functioned herein to localize heterologous proteins to the chloroplast was derived from Brassica napus acyl-ACP thioesterase.

[0176] An alternative means for localizing genes to chloroplast or plastid includes chloroplast or plastid transformation. Recombinant plants can be produced in which only the chloroplast DNA has been altered to incorporate the molecules envisioned in this application. Promoters that function in chloroplasts are known in the art (Hanley-Bowden et al., Trends in Biochemical Sciences 12:67-70 (1987)). Methods and compositions for obtaining cells containing chloroplasts into which heterologous DNA has been inserted have been described, for example, by Daniell et al. (U.S. Pat. No. 5,693,507) and Maliga et al. (U.S. Pat. No. 5,451,513).

### Combinations of Strategies

[0177] According to the present invention, in the production of a heterologous host for the production and accumulation of one or more target PUFAs, any one or more (any combination) of the strategies described herein for improving the production and/or accumulation of PUFAs in the host can be used. Indeed, it is anticipated that various combinations of strategies will be additive or synergistic and provide improved production and/or accumulation of PUFAs as compared to in the absence of one or more such strategies. Indeed, the Examples provide exemplary strategies for the production of PUFAs in a host organism.

[0178] Any plant or plant cell using these combinations of modifications, or any other modification or combination of modifications described herein, is encompassed by the invention. In some embodiments, such a plant has been further genetically modified to express an accessory protein as described herein for the improvement of the production and/or accumulation of PUFAs (or other bioactive products of the PUFA synthase) by the host (e.g., ACoAS, GPAT, LPAAT, DAGAT or acetyl CoA carboxylase (ACCase)). Furthermore, any host cell or organism using any modifications or combination of modifications described herein is encompassed by the invention, as are any products derived from such cell or organisms, including seed or oil comprising the target PUFAs.

[0179] In some embodiments, plants to genetically modify according to the present invention (e.g., plant host cells) includes, but is not limited to, any higher plants, including both dicotyledonous and monocotyledonous plants, and particularly consumable plants, including crop plants and especially plants used for their oils. Such plants can include, but are not limited to, for example: soybean, rapeseed, linseed, corn, safflowers, sunflowers and tobacco. Thus, any plant species or plant cell can be selected. In some embodiments, the plant is of the family Fabaceae (Leguminosae, legume family, pea family, bean family or pulse family). In some embodiments, the plant is of the genus Glycine. In some embodiments, the plant is Glycine albicans, Glycine aphyonota, Glycine arenari, Glycine argyrea, Glycine canescens, Glycine clandestine, Glycine curvata, Glycine cyrtoloba, Glycine falcate, Glycine gracei, Glycine hirticaulis, Glycine hirticaulis subsp. leptosa, Glycine lactovirens, Glycine latifolia, Glycine latrobeana, Glycine microphylla, Glycine montis-douglas, Glycine peratosa, Glycine pescadrensis, Glycine pindanica, Glycine pullenii, Glycine rubiginosa, Glycine stenophita, Glycine syndetika, Glycine tabacina, Glycine tomentella, Glycine soja, or Glycine max (soybean). In some embodiments, the plant is peanut, beans (Phaseolus vulgaris), broad beans (Vicia faba) or peas (Pisum sativum).

[0180] “Plant parts,” as used herein, include any parts of a plant, including, but not limited to, seeds (including mature seeds and immature seeds), pollen, embryos, flowers, fruits, shoots, leaves, roots, stems, explants, etc. In some embodiments, a genetically modified plant has a genome that is modified (e.g., mutated or changed) from its normal (e.g., wild-type or naturally occurring) form such that the desired result is achieved (e.g., increased or modified PUFA synthase and/or production and/or accumulation of a desired product using the PUFA synthase). In some embodiments, genetic modification of a plant can be accomplished using classical strain development and/or molecular genetic techniques. Methods for producing a transgenic plant, wherein a recombinant nucleic acid molecule encoding a desired amino acid sequence is incorporated into the genome of the plant, are known in the art. In some embodiments, a plant to genetically modify according to the present invention is a plant suitable for consumption by animals, including humans.

[0181] Plant lines from these plants, optimized for a particularly desirable trait, e.g., disease resistance, ease of plant transformation, oil content or profile, etc., can be produced, selected or identified. In some embodiments, plant lines can be selected through plant breeding, or through methods such as marker assisted breeding and tilling. In some embodiments, plant cell cultures can be used and, for example, are not grown into differentiated plants and cultivated using ordinary agricultural practices, but instead grown and maintained in a liquid medium.

[0182] In some embodiments, the plant can be an oil seed plant, wherein the oil seeds, and/or the oil in the oil seeds contain PUFAs produced by the PUFA synthase. In some embodiments, such oils can contain a detectable amount of at least one target or primary PUFA that is the product of the PUFA synthase. In some embodiments, such oils can be substantially free of intermediate or side products that are not the target or primary PUFA products and that are not naturally produced by the endogenous FAS system in the wild-type plants (e.g., wild-type plants produce some shorter or medium chain PUFAs, such as 18 carbon PUFAs, via the FAS system, but there will be new, or additional, fatty acids produced in the plant as a result of genetic modification with a PUFA synthase).

[0183] With regard to the production of genetically modified plants, methods for the genetic engineering of plants are well known in the art. For instance, numerous methods for plant transformation have been developed, including biological and physical transformation protocols for dicotyledonous plants as well as monocotyledonous plants (e.g., Goto-Fumiyuki et al., Nature Biotech 17:282-286 (1999); and Miki et al., Methods in Plant Molecular Biology and Biotechnology, B. R. Glick and J. E. Thompson, Eds., CRC Press, Inc., Boca Raton, pp. 67-88 (1993)). In addition, vectors and in vitro culture methods for plant cell or tissue transformation and regeneration of plants are available, for example, in Gruber et al., Methods in Plant Molecular Biology and Biotechnology, B. R. Glick and J. E. Thompson, Eds., CRC Press, Inc., Boca Raton, pp. 89-119 (1993).

[0184] The present invention is drawn to an isolated nucleic acid molecule comprising a nucleic acid sequence selected from SEQ ID NOs: 6-10 as well as an isolated nucleic acid molecule comprising a modification or mutation of such a sequence as described herein. The present invention is draw to isolated polypeptides comprising an amino acid sequence selected from SEQ ID NOs: 1-5 as well as an isolated polypeptide comprising a modification or mutation or such a sequence as described herein.

[0185] The present invention includes a recombinant expression vector pDAB7361. The present invention includes a recombinant expression vector pDAB7362. The present invention includes a recombinant expression vector pDAB7363. The present invention includes a recombinant expression vector pDAB7365. The present invention includes a recombinant expression vector pDAB7368. The present invention includes a recombinant expression vector pDAB7369. The present invention includes a recombinant expression vector pDAB7370. The present invention includes a recombinant expression vector pDAB100518. The present invention includes a recombinant expression vector pDAB101476. The present invention includes a recombinant expression vector pDAB9166. The present invention includes a recombinant expression vector pDAB9167. The present invention includes a recombinant expression vector pDAB7379. The present invention includes a recombinant expression vector pDAB7380. The present invention includes a recombinant expression vector pDAB9323. The present invention includes a recombinant expression vector pDAB9330. The present invention includes a recombinant expression vector pDAB9337. The present invention includes a recombinant expression vector pDAB9338. The present invention includes a recombinant expression vector pDAB9344. The present invention includes a recombinant expression vector pDAB9396. The present invention includes a recombinant expression vector pDAB101412. The present invention includes a recombinant expression vector pDAB7733. The present invention includes a recombinant expression vector pDAB7734. The present invention includes a recombinant expression vector pDAB101493. The present invention includes a recombinant expression vector pDAB109507. The present invention includes a recombinant expression vector pDAB109508. The present invention includes a recombinant expression vector pDAB109509. The present invention includes a recombinant expression vector pDAB9151. The present invention includes a recombinant expression vector pDAB108207. The present invention includes a recombinant expression vector pDAB108208. The present invention includes a recombinant expression vector pDAB108209. The present invention includes a recombinant expression vector pDAB9159. The present invention includes a recombinant expression vector pDAB9147. The present invention includes a recombinant expression vector pDAB108224. The present invention includes a recombinant expression vector pDAB108225.

[0186] The present invention includes a soybean plant, descendant, cell, tissue, seed, or part thereof comprising a recombinant expression vector pDAB7361. The present invention includes a soybean plant, descendant, cell, tissue, seed, or part thereof comprising a recombinant expression vector pDAB7362. The present invention includes a soybean plant, descendant, cell, tissue, seed, or part thereof comprising a recombinant expression vector pDAB7363. The present invention includes a soybean plant, descendant, cell, tissue, seed, or part thereof comprising a recombinant expression vector pDAB7365. The present invention includes a soybean plant, descendant, cell, tissue, seed, or part thereof comprising a recombinant expression vector pDAB7368. The present invention includes a soybean plant, descendant, cell, tissue, seed, or part thereof comprising a recombinant expression vector pDAB7369. The present invention includes a soybean plant, descendant, cell, tissue, seed, or part thereof comprising a recombinant expression vector pDAB7370. The present invention includes a soybean plant, descendant, cell, tissue, seed, or part thereof comprising a recombinant expression vector pDAB100518. The present invention includes a soybean plant, descendant, cell, tissue, seed, or part thereof comprising a recombinant expression vector pDAB101476. The present invention includes a soybean plant, descendant, cell, tissue, seed, or part thereof comprising a recombinant expression vector pDAB9166. The present invention includes a soybean plant, descendant, cell, tissue, seed, or part thereof comprising a recombinant expression vector pDAB9167.

[0187] The present invention includes a soybean plant, descendant, cell, tissue, seed, or part thereof comprising a recombinant expression vector pDAB7379. The present invention includes a soybean plant, descendant, cell, tissue, seed, or part thereof comprising a recombinant expression vector pDAB7380. The present invention includes a soybean plant, descendant, cell, tissue, seed, or part thereof comprising a recombinant expression vector pDAB9323. The present invention includes a soybean plant, descendant, cell, tissue, seed, or part thereof comprising a recombinant expression vector pDAB9330. The present invention includes a soybean plant, descendant, cell, tissue, seed, or part thereof comprising a recombinant expression vector pDAB9337. The present invention includes a soybean plant, descendant, cell, tissue, seed, or part thereof comprising a recombinant expression vector pDAB9338. The present invention includes a soybean plant, descendant, cell, tissue, seed, or part thereof comprising a recombinant expression vector pDAB9344. The present invention includes a soybean plant, descendant, cell, tissue, seed, or part thereof comprising a recombinant expression vector pDAB9396. The present invention includes a soybean plant, descendant, cell, tissue, seed, or part thereof comprising a recombinant expression vector pDAB101412. The present invention includes a soybean plant, descendant, cell, tissue, seed, or part thereof comprising a recombinant expression vector pDAB7733. The present invention includes a soybean plant, descendant, cell, tissue, seed, or part thereof comprising a recombinant expression vector pDAB7734.

[0188] The present invention includes a soybean plant, descendant, cell, tissue, seed, or part thereof comprising a recombinant expression vector pDAB101493. The present invention includes a soybean plant, descendant, cell, tissue, seed, or part thereof comprising a recombinant expression vector pDAB109507. The present invention includes a soybean plant, descendant, cell, tissue, seed, or part thereof comprising a recombinant expression vector pDAB109508. The present invention includes a soybean plant, descendant, cell, tissue, seed, or part thereof comprising a recombinant expression vector pDAB109509. The present invention includes a soybean plant, descendant, cell, tissue, seed, or part thereof comprising a recombinant expression vector pDAB9151. The present invention includes a soybean plant, descendant, cell, tissue, seed, or part thereof comprising a recombinant expression vector pDAB108207. The present invention includes a soybean plant, descendant, cell, tissue, seed, or part thereof comprising a recombinant expression vector pDAB108208. The present invention includes a soybean plant, descendant, cell, tissue, seed, or part thereof comprising a recombinant expression vector pDAB108209. The present invention includes a soybean plant, descendant, cell, tissue, seed, or part thereof comprising a recombinant expression vector pDAB9159. The present invention includes a soybean plant, descendant, cell, tissue, seed, or part thereof comprising a recombinant expression vector pDAB9147. The present invention includes a soybean plant, descendant, cell, tissue, seed, or part thereof comprising a recombinant expression vector pDAB108224. The present invention includes a soybean plant, descendant, cell, tissue, seed, or part thereof comprising a recombinant expression vector pDAB108225.

[0189] As used herein, the term “transfection” is used to refer to any method by which an exogenous nucleic acid molecule (e.g., a recombinant nucleic acid molecule) can be inserted into a cell. The term “transformation” can be used interchangeably with the term “transfection” when such term is used to refer to the introduction of nucleic acid molecules into microbial cells, such as algae, bacteria and yeast, or into plant cells. In microbial and plant systems, the term “transformation” is used to describe an inherited change due to the acquisition of exogenous nucleic acids by the microorganism or plant and is essentially synonymous with the term “transfection.” In some embodiments, transfection techniques include, but are not limited to, transformation, particle bombardment, diffusion, active transport, bath sonication, electroporation, microinjection, lipofection, adsorption, infection and protoplast fusion.

[0190] A widely utilized method for introducing an expression vector into plants is based on the natural transformation system of Agrobacterium. Horsch et al., Science 227:1229 (1985). A. tumefaciens and A. rhizogenes are plant pathogenic soil bacteria known to be useful to genetically transform plant cells. The Ti and Ri plasmids of A. tumefaciens and A. rhizogenes, respectively, carry genes responsible for genetic transformation of the plant. C. I. Kado, Crit. Rev. Plant. Sci. 10:1 (1991). Descriptions of Agrobacterium vector systems and methods for Agrobacterium-mediated gene transfer are also available, e.g., Gruber et al., supra, Miki et al., supra, Moloney et al., Plant Cell Reports 8:238 (1989), and U.S. Pat. Nos. 4,940,838 and 5,464,763.

[0191] Another known method of plant transformation is microprojectile-mediated transformation wherein DNA is carried on the surface of microprojectiles. In this method, the expression vector is introduced into plant tissues with a biolistic device that accelerates the microprojectiles to speeds sufficient to penetrate plant cell walls and membranes. Sanford et al., Part. Sci. Technol. 5:27 (1987), J. C. Sanford, Trends Biotech. 6:299 (1988), J. C. Sanford, Physiol. Plant 79:206 (1990), Klein et al., Biotechnology 10:268 (1992).

[0192] Yet another method for physical delivery of DNA to plants is sonication of target cells. Zhang et al., Bio/Technology 9:996 (1991). Also, liposome or spheroplast fusion have been used to introduce expression vectors into plants. Deshayes et al., EMBO J., 4:2731 (1985), Christou et al., Proc. Natl. Acad. Sci. USA 84:3962 (1987). Direct uptake of DNA into protoplasts using CaCl₂ precipitation, polyvinyl alcohol or poly-L-ornithine have also been reported. Hain et al., Mol. Gen. Genet. 199:161 (1985) and Draper et al., Plant Cell Physiol. 23:451 (1982). Electroporation of protoplasts and whole cells and tissues has also been described. Donn et al., Abstracts of VIIth International Congress on Plant Cell and Tissue Culture IAPTC, A2-38, p. 53 (1990); D'Halluin et al., Plant Cell 4:1495-1505 (1992) and Spencer et al., Plant Mol. Biol. 24:51-61 (1994). Additionally, silicone carbide whiskers (Kaepler et al., 1990, Plant Cell Reports) and in plant transformation using, for example, a flower dipping methodology (Clough and Bent, Plant J. 16:735-743 (1998)) can also be used. The exact plant transformation methodology can vary somewhat depending on the plant species selected and the plant cell type selected for transformation (e.g., seedling derived cell types such as hypocotyls and cotyledons or embryonic tissue).

[0193] Following the introduction of the genetic construct into plant cells, plant cells can be grown and upon emergence of differentiating tissue such as shoots and roots, mature plants can be generated. In some embodiments, a plurality of plants can be generated. Methodologies for regenerating plants are known to those of ordinary skill in the art and can be found, for example, in: Plant Cell and Tissue Culture, 1994, Vasil and Thorpe Eds. Kluwer Academic Publishers and in: Plant Cell Culture Protocols (Methods in Molecular Biology 111, 1999 Hall Eds Humana Press).

[0194] In some embodiments, a genetically modified plant described herein can be cultured in a fermentation medium or grown in a suitable medium such as soil. In some embodiments, a suitable growth medium for higher plants can include any growth medium for plants, including, but not limited to, soil, sand, any other particulate media that support root growth (e.g., vermiculite, perlite, etc.) or hydroponic culture, as well as suitable light, water and nutritional supplements that optimize the growth of the higher plant.

[0195] It will be appreciated by one skilled in the art that use of recombinant DNA technologies can improve control of expression of transfected nucleic acid molecules by manipulating, for example, the number of copies of the nucleic acid molecules within the host cell, the efficiency with which those nucleic acid molecules are transcribed, the efficiency with which the resultant transcripts are translated, and the efficiency of post-translational modifications. Additionally, the promoter sequence might be genetically engineered to improve the level of expression as compared to the native promoter. Recombinant techniques useful for controlling the expression of nucleic acid molecules include, but are not limited to, integration of the nucleic acid molecules into one or more host cell chromosomes, addition of vector stability sequences to plasmids, substitutions or modifications of transcription control signals(e.g., promoters, operators, enhancers), substitutions or modifications of translational control signals (e.g., ribosome binding sites, Shine-Dalgarno sequences), modification of nucleic acid molecules to correspond to the codon usage of the host cell, and deletion of sequences that destabilize transcripts.

[0196] In some embodiments, a plant can include those plants that are known to produce compounds used as pharmaceutical agents, flavoring agents, nutraceutical agents, functional food ingredients or cosmetically active agents or plants that are genetically engineered to produce these compounds/agents.

[0197] All of these embodiments of the invention apply to the discussion of any of the genetically modified organisms and methods of producing and using such organisms as described herein.

Products from Genetically Modified Organisms

[0198] In some embodiments, a genetically modified organism of the invention produces one or more polyunsaturated fatty acids including, but not limited to, EPA (C20:5, n-3), DHA (C22:6, n-3), DP A (C22:5, n-6 or n-3), ARA (C20:4, n-6), GLA (CI 8:3, n-6), ALA (C18:3, n-3), and/or SDA (C18:4, n-3)), and in some embodiments, one or more longer-chain PUFAs, including, but not limited to, EPA (C20:5, n-3), DHA (C22:6, n-3), DPA (C22:5, n-6 or n-3), or DTA (C22:4, n-6), or any combination thereof. In some embodiments, a genetically modified plant of the invention produces one or more polyunsaturated fatty acids including, but not limited to, EPA (C20:5, n-3), DHA (C22:6, n-3), and/or DPA (C22:5, n-6 or n-3), or any combination thereof. In some embodiments, a genetically modified plant of the invention does not have a high oleic background.

[0199] In some embodiments, a genetically modified organism is a plant that has been genetically modified to recombinantly express a PUFA synthase and a PPTase, as described herein. In some embodiments, such a plant has been genetically modified further to express an accessory protein as described herein for the improvement of the production and/or accumulation of PUFAs (or other bioactive products of the PUFA synthase) by the host (e.g., ACoAS, GPAT, LPAAT, DAGAT or ACCase).

[0200] Some embodiments of the present invention include the production of polyunsaturated fatty acids of desired chain length and with desired numbers of double bonds and, by extension, oil seed and oils obtained from the genetically modified plants described herein (e.g., obtained from the oil or seeds of such plants) comprising these PUFAs. Examples of PUFAs that can be produced by the present invention include, but are not limited to, DHA (docosahexaenoic acid (C22:6, n-3)), ARA (eicosatetraenoic acid or arachidonic acid (C20:4, n-6)), DPA (docosapentaenoic acid (C22:5, n-6 or n-3)), and EPA (eicosapentaenoic acid (C20:5, n-3)), and any combinations thereof. The present invention allows for the production of commercially valuable lipids enriched in one or more desired (target or primary) PUFAs by the development of genetically modified plants through the use of a PUFA synthase that produces PUFAs.

[0201] In some embodiments, a given PUFA synthase derived from a particular organism will produce particular PUFA(s), such that selection of a PUFA synthase from a particular organism will result in the production of specified target or primary PUFAs. In some embodiments, the ratio of the PUFAs can differ depending on the selection of the particular PUFA synthase and on how that system responds to the specific conditions in which it is expressed. For example, use of a PUFA synthase from Thraustochytrium 23 B (ATCC No. 20892) can also result in the production of DHA and DPA(n-6) as the target or primary PUFAs; however, in the case of Thraustochytrium 23B, the ratio of DHA to DPA(n-6) is 10:1 (and can range from 8:1 to 40:1), whereas in Schizochytrium, the ratio is typically 2.5:1. In some embodiments, a given PUFA synthase can be modified by intermixing proteins and domains from different PUFA synthases, or one can modify a domain or protein of a given PUFA synthase to change the target PUFA product and/or ratios.

[0202] In some embodiments, reference to “intermediate products” or “side products” of an enzyme system that produces PUFAs refers to any products, and particularly, fatty acid products, that are produced by the enzyme system as a result of the production of the target or primary PUFA(s) of the system, but that are not the primary or target PUFA(s). In some embodiments, intermediate and side products can include non-target fatty acids that are naturally produced by the wild-type plant, or by the parent plant used as a recipient for the indicated genetic modification, but are now classified as intermediate or side products because they are produced in greater levels as a result of the genetic modification, as compared to the levels produced by the wild-type plant, or by the parent plant used as a recipient for the indicated genetic modification. In some embodiments, a primary or target PUFA of one enzyme system can be an intermediate of a different enzyme system where the primary or target product is a different PUFA. For example, when using the standard pathway to produce EPA, fatty acids such as GLA, DGLA and SDA are produced as intermediate products in significant quantities (e.g., U.S. Appl. Pub. No. 2004/0172682). Similarly, and also illustrated by U.S. Appl. Pub. No. 2004/0172682, when using the standard pathway to produce DHA, in addition to the fatty acids mentioned above, ETA and EPA (notably the target PUFA in the first example above) can be produced in significant quantities and can be present in significantly greater quantities relative to the total fatty acid product than the target PUFA itself.

[0203] In some embodiments, to produce significantly high yields of one or more desired polyunsaturated fatty acids, a plant can be genetically modified to introduce a PUFA synthase system into the plant. Plants are not known to endogenously contain a PUFA synthase, and therefore, the present invention represents an opportunity to produce plants with unique fatty acid production capabilities. The present invention provides genetically engineered plants to produce one or more PUFAs in the same plant, including, but not limited to, EPA, DHA, DPA (n3 or n6), ARA, GLA, SDA and others, including any combination thereof. The present invention offers the ability to create any one of a number of “designer oils” in various ratios and forms. In some embodiments, the use of a PUFA synthase from the particular marine organisms described herein can extend the range of PUFA production and successfully produce such PUFAs within temperature ranges used to grow most crop plants.

[0204] In some embodiments, to be “substantially free” of intermediate or side products of the system for synthesizing PUFAs, or to not have intermediate or side products present in substantial amounts, means that any intermediate or side product fatty acids (non-target PUFAs) that are produced in the genetically modified plant (and/or parts of plants and/or seed oil fraction) as a result of the introduction or presence of the enzyme system for producing PUFAs (e.g., that are not produced by the wild-type plant or the parent plant used as a recipient for the indicated genetic modification), can be present in a quantity that is less than 10% by weight of total fatty acids, less than 9% by weight of total fatty acids, less than 8% by weight of total fatty acids, less than 7% by weight of total fatty acids, less than 6% by weight of total fatty acids, less than 5% by weight of total fatty acids, less than 4% by weight of total fatty acids, less than 3% by weight of total fatty acids, less than 2% by weight of total fatty acids, less than 1% by weight of total fatty acids, or less than 0.5% by weight of total fatty acids.

[0205] In some embodiments, a genetically modified plant, descendant, cell, tissue, or part thereof of the invention or an oil or seed obtained from a genetically modified plant, descendant, cell, tissue, or part thereof of the invention comprises detectable amounts of DHA (docosahexaenoic acid (C22:6, n-3)), DPA(n-6) (docosapentaenoic acid (C22:5 n-6)) or EPA (eicosapentaenoic acid (C20:5, n-3)). In some embodiments, a genetically modified plant, descendant, cell, tissue, or part thereof of the invention or an oil or seed obtained from a genetically modified plant, descendant, cell, tissue, or part thereof of the invention comprises at least 0.01%, at least 0.02%, at least 0.03%, at least 0.04%, at least 0.05%, at least 0.06%, at least 0.07%, at least 0.08%, at least 0.09%, at least 0.1%, at least 0.2%, at least 0.3%, at least 0.4%, at least 0.5%, at least 0.6%, at least 0.7%, at least 0.8%, at least 0.9%, at least 1%, at least 1.5%, at least 2%, at least 2.5%, at least 3%, at least 3.5%), at least 4%, at least 4.5%, at least 5%, at least 5.5%, at least 6%, at least 6.5%, at least 7%, at least 7.5%, at least 8%, at least 8.5%, at least 9%, at least 9.5%, at least 10%, at least 10.5%, at least 1 1%, at least 1 1.5%, at least 12%, at least 12.5%, at least 13%, at least 13.5%, at least 14%, at least 14.5% or at least 15% DHA by weight of total fatty acids. Useful ranges can be selected between any of these values, for example, 0.01% to 15%, 0.05% to 10% and 1% to 5% DHA by weight of total fatty acids.

[0206] In some embodiments, a genetically modified plant, descendant, cell, tissue, or part thereof of the invention or an oil or seed obtained from a genetically modified plant, descendant, cell, tissue, or part thereof of the invention comprises at least 0.01%, at least 0.02%, at least 0.03%, at least 0.04%, at least 0.05%, at least 0.06%, at least 0.07%, at least 0.08%, at least 0.09%, at least 0.1%, at least 0.2%, at least 0.3%, at least 0.4%, at least 0.5%, at least 0.6%, at least 0.7%, at least 0.8%, at least 0.9%, at least 1%, at least 1.5%, at least 2%, at least 2.5%, at least 3%, at least 3.5%, at least 4%, at least 4.5%, at least 5%, at least 5.5%, at least 6%, at least 6.5%, at least 7%, at least 7.5%, at least 8%, at least 8.5%, at least 9%, at least 9.5%, or at least 10% EPA by weight of total fatty acids. Useful ranges can be selected between any of these values, for example, 0.01% to 10%, 0.05% to 5% and 0.1% to 5% EPA by weight of total fatty acids.

[0207] In some embodiments, a genetically modified plant, descendant, cell, tissue, or part thereof of the invention or an oil or seed obtained from a genetically modified plant, descendant, cell, tissue, or part thereof of the invention comprises at least 0.01%, at least 0.02%, at least 0.03%, at least 0.04%, at least 0.05%, at least 0.06%, at least 0.07%, at least 0.08%, at least 0.09%, at least 0.1%, at least 0.2%, at least 0.3%, at least 0.4%, at least 0.5%, at least 0.6%, at least 0.7%, at least 0.8%, at least 0.9%, at least 1%, at least 1.5%, at least 2%, at least 2.5%, at least 3%, at least 3.5%, at least 4%, at least 4.5%, at least 5%, at least 5.5%, at least 6%, at least 6.5%, at least 7%, at least 7.5%, at least 8%, at least 8.5%, at least 9%, at least 9.5%, or at least 10% DPA(n-6) by weight of total fatty acids. Useful ranges can be selected between any of these values, for example, 0.01% to 10%, 0.01% to 5%, 0.01% to 1%, 0.01% to 0.05%, 0.05% to 5% and 0.1% to 5% DPA(n-6) by weight of total fatty acids.

[0208] In some embodiments, a genetically modified plant, descendant, cell, tissue, or part thereof of the invention or an oil or seed obtained from a genetically modified plant, descendant, cell, tissue, or part thereof of the invention comprises a ratio of EPA:DHA of at least 1:1, at least 1:1.5, at least 1:2, at least 1:2.5, at least 1:3, at least 1:3.5, at least 1:4, at least 1:4.5, at least 1:5, at least 1:5.5, at least 1:6, at least 1:6.5, at least 1:7, at least 1:7.5, at least 1:8, at least 1:8.5, at least 1:9, at least 1:10, at least 1:11, at least 1:12, at least 1:13, at least 1:14, at least 1:15, at least 1:16, at least 1:17, at least 1:18, at least 1:19, at least 1:20, at least 1:21, at least 1:22, at least 1:23, at least 1:24, at least 1:25, at least 1:26, at least 1:27, at least 1:28, at least 1:29, or at least 1:30 by weight of total fatty acids. Useful ranges can be selected between any of these values, for example, a ratio of EPA:DHA of 1:1 to 1:30, 1:1 to 1:25, 1:1 to 1:20, 1:1 to 1:15, 1:1 to 1:10, 1:1 to 1:5, 1:1 to 1:3, and 1:1 to 1:2 by weight of total fatty acids.

[0209] In some embodiments, a genetically modified plant, descendant, cell, tissue, or part thereof of the invention or an oil or seed obtained from a genetically modified plant, descendant, cell, tissue, or part thereof of the invention comprises a ratio of DPA(n-6):DHA of at least 1:1, at least 1:1.5, at least 1:2, at least 1:2.5, at least 1:3, at least 1:3.5, at least 1:4, at least 1:4.5, at least 1:5, at least 1:5.5, at least 1:6, at least 1:6.5, at least 1:7, at least 1:7.5, at least 1:8, at least 1:8.5, at least 1:9, or at least 1:10 by weight of total fatty acids. Useful ranges can be selected between any of these values, for example, a ratio of DPA(n-6):DHA of 1:1 to 1:10, 1:1 to 1:5, 1:1 to 1:3 and 1:1 to 1:2 by weight of total fatty acids.

[0210] In some embodiments, an oil obtained from a genetically modified plant, descendant, cell, tissue, or part thereof or seed of the invention comprises at least 70%, at least 75%, at least 80%, at least 85%, at least 90%, at least 95%, or at least 99% triglycerides by weight of the oil. In some embodiments, an oil obtained from a genetically modified plant, descendant, cell, tissue, or part thereof or seed of the invention comprises from 70% to 99% triglycerides by weight of the oil, from 75% to 99% triglycerides by weight of the oil, from 80%) to 99% triglycerides by weight of the oil, from 85% to 99% triglycerides by weight of the oil, or from 90% to 99% triglycerides by weight of the oil. Methods for purification and analysis of triglyceride have been described (e.g., V. Ruiz-Gutierrez and L. J. Barron, J. Chromatogr. B. Biomed. Appl., 671:133-168, 1995).

[0211] In some embodiments, when the target product of a PUFA synthase system is a long chain PUFA, such as DHA, DP A (n-6 or n-3), or EPA, intermediate products and side products that are not present in substantial amounts in the total lipids of plants genetically modified with such a PUFA synthase system can include, but are not limited to: gamma-linolenic acid (GLA; 18:3, n-6); stearidonic acid (STA or SDA; 18:4, n-3); dihomo-gamma-linolenic acid (DGLA or HGLA; 20:3, n-6), arachidonic acid (ARA, C20:4, n-6); eicosatrienoic acid (ETA; 20:3, n-9) and various other intermediate or side products, such as 20:0; 20:1 (Δ5); 20:1 (Δ11); 20:2 (Δ8,11); 20:2 (Δ11,14); 20:3 (Δ5,11,14); 20:3 (Δ11,14,17); mead acid (20:3; Δ5,8,11); or 20:4 (Δ5,1,14,17).

[0212] The genetic modification of a plant according to the present invention can result in the production of one or more PUFAs by the plant. In some embodiments, the PUFA profile and the ratio of the PUFAs produced by the plant are not necessarily the same as the PUFA profile or ratio of PUFAs produced by the organism from which the PUFA synthase was derived.

[0213] In some embodiments, a genetically modified plant, descendant, cell, tissue, or part thereof of the present invention can be engineered to produce PUFAs through the activity of the PUFA synthase. In some embodiments, the PUFAs can be recovered through purification processes that extract the compounds from the plant, descendant, cell, tissue, or part thereof. In some embodiments, the PUFAs can be recovered by harvesting the plant, descendant, cell, tissue, or part thereof. In some embodiments, the PUFAs can be recovered by harvesting the oil from the plant, descendant, cell, tissue, or part thereof (e.g., from the oil seeds) or seeds from the plant, descendant, cell, tissue, or part thereof. In some embodiments, the plant, descendant, cell, tissue, or part thereof can also be consumed in its natural state or further processed into consumable products.

[0214] In some embodiments, a genetically modified plant, descendant, cell, tissue, or part thereof of the invention can produce one or more polyunsaturated fatty acids. In some embodiments, the plant, descendant, cell, tissue, or part thereof can produce (e.g., in its mature seeds, if an oil seed plant, or in the oil of the seeds of an oil seed plant) at least one PUFA (the target PUFA), and wherein the total fatty acid profile in the plant, or the part of the plant that accumulates PUFAs (e.g., mature seeds, if the plant is an oil seed plant or the oil of the seeds of an oil seed plant), comprises a detectable amount of this PUFA or PUFAs. In some embodiments, the target PUFA is at least a 20 carbon PUFA and comprises at least 3 double bonds, at least 4 double bonds, or at least 5 double bonds. In some embodiments, the target PUFA can be a PUFA that is not naturally produced by the plant. In some embodiments, the total fatty acid profile in the plant or in the part of the plant that accumulates PUFAs (including the seed oil of the plant) comprises at least 0.1% of the target PUFA(s) by weight of total fatty acids, at least 0.2%, at least 0.3%, at least 0.4%, at least 0.5%, at least 1%, at least 1.5%, at least 2%, at least 2.5%, at least 3%, at least 3.5%, at least 4%, at least 4.5%, at least 5%, at least 5.5%, at least 10%, at least 15%, at least 20%, at least 25%, at least 30%, at least 35%, at least 40%, at least 45%, at least 50%, at least 55%, at least 60%, at least 65%, at least 70%, at least 75%, more than 75% of at least one polyunsaturated fatty acid (the target PUFA or PUFAs) by weight of total fatty acids, or any percentage from 0.1% to 75%, or greater than 75% (up to 100% or 100%), in 0.1% increments, of the target PUFA(s).

[0215] As used herein, reference to a percentage amount of PUFA is the percentage by weight of total fatty acids extracted, unless otherwise stated. In some embodiments, total fatty acids are determined by gas chromatography (GC) analysis of a fatty acid methyl ester (F AME) preparation, although determination of total fatty acids is not limited to this method.

[0216] In some embodiments, the total fatty acids in a plant of the invention (and/or descendant, cell, tissue, or part thereof or seed oil fraction) can contain less than 10% by weight of the total fatty acids produced by the plant, less than 9% by weight of the total fatty acids produced by the plant, less than 8% by weight of the total fatty acids produced by the plant, descendant, cell, tissue, or part thereof, less than 7% by weight of the total fatty acids produced by the plant, descendant, cell, tissue, or part thereof, less than 6% by weight of the total fatty acids produced by the plant, descendant, cell, tissue, or part thereof, less than 5% by weight of the total fatty acids produced by the plant, descendant, cell, tissue, or part thereof, less than 4% by weight of the total fatty acids produced by the plant, descendant, cell, tissue, or part thereof, less than 3% by weight of the total fatty acids produced by the plant, descendant, cell, tissue, or part thereof, less than 2% by weight of the total fatty acids produced by the plant, descendant, cell, tissue, or part thereof, less than 1% by weight of the total fatty acids produced by the plant, descendant, cell, tissue, or part thereof of a fatty acid selected from gamma-linolenic acid (GLA; 18:3, n-6); stearidonic acid (STA or SDA; 18:4, n-3); dihomo-gamma-linolenic acid (DGLA or HGLA; 20:3, n-6), arachidonic acid (ARA, C20:4, n-6); eicosatrienoic acid (ETA; 20:3, n-9) and various other fatty acids, such as 20:0; 20:1 (Δ5); 20:1 (Δ11); 20:2 (Δ8,11); 20:2 (Δ11,14); 20:3 (Δ5,11,14); 20:3 (Δ11,14,17); mead acid (20:3; Δ5,8,11); or 20:4 (Δ5,1,14,17).

[0217] The present invention includes any seed produced by the plants, descendants, cells, tissues, or parts thereof described herein, as well as any oil produced by a plant, descendant, cell, tissue, or part thereof or seed of the present invention. The present invention also includes any products produced using the plants, descendants, cells, tissues, or parts thereof, seed or oils as described herein.

### Uses and Products Related to the Genetically Modified Organisms of the Invention

[0218] The present invention includes a method to produce PUFAs by growing or culturing a genetically modified plant, descendant, cell, tissue, or part thereof (e.g., soybean) of the present invention described in detail above. In some embodiments, such a method includes, for example, growing in a suitable environment, such as soil, a plant that has a genetic modification as described previously herein and in accordance with the present invention.

[0219] The present invention includes a method to produce an oil comprising at least one PUFA, comprising recovering oil from a genetically modified plant, descendant, cell, tissue, or part thereof of the invention or from a seed of a genetically modified plant, descendant, cell, tissue, or part thereof of the invention.

[0220] The present invention includes a method to produce an oil comprising at least one PUFA, comprising growing a genetically modified plant, descendant, cell, tissue, or part thereof of the invention. The present invention includes a method to produce at least one PUFA in a seed oil comprising recovering an oil from a seed of a genetically modified plant, descendant, cell, tissue, or part thereof of the invention. The present invention includes a method to produce at least one PUFA in a seed oil comprising growing a genetically modified plant, descendant, cell, tissue, or part thereof of the invention.

[0221] The present invention includes a method to provide a supplement or therapeutic product containing at least one PUFA to an individual in need thereof, comprising providing to the individual in need thereof a genetically modified plant, descendant, cell, tissue, or part thereof of the invention, an oil of the invention, a seed of the invention, a food product of the invention, a functional food of the invention, or a pharmaceutical product of the invention. The present invention also includes a method to produce a genetically modified plant, descendant, cell, tissue, or part thereof of the invention comprising transforming a plant or plant cell with (i) a nucleic acid sequence encoding an algal PUFA synthase system that produces at least one polyunsaturated fatty acid (PUFA); and (ii) a nucleic acid sequence encoding a phosphopantetheinyl transferase (PPTase) that transfers a phosphopantetheinyl cofactor to an algal PUFA synthase system ACP domain. In some embodiments, the method further comprises transforming the plant or plant cell with (iii) a nucleic acid sequence encoding an acyl-CoA synthetase (ACoAS) that catalyzes the conversion of long chain PUFA free fatty acids (FF A) to acyl-CoA.

[0222] In some embodiments, the PUFA of such methods of the invention is DHA, DPA(n-6) and/or EPA. In some embodiments, the oil produced by such methods of the invention is a soybean oil. In some embodiments, the oil produced by such methods of the invention comprises 0.05% to 15% DHA by weight of total fatty acids, or any amount or range thereof described further herein. In some embodiments, the oil produced by such methods of the invention further comprises 0.01% to 5% EPA by weight of total fatty acids, or any amount or range thereof described further herein. In some embodiments, the oil produced by such methods of the invention further comprises 0.01% to 5% DPA(n-6) by weight of total fatty acids, or any amount or range thereof described further herein. In some embodiments, the oil produced by such methods of the invention comprises a ratio of EPA:DHA of 1:1 to 1:30 by weight of total fatty acids, a ratio of EPA:DHA of 1:1 to 1:3 by weight of total fatty acids, or any amount or range thereof described further herein. In some embodiments, the oil produced by such methods of the invention further comprises a ratio of DPA(n-6):DHA of 1:1 or 1:10 by weight of total fatty acids, a ratio of DPA(n-6):DHA of 1:1 to 1:3 by weight of total fatty acids, or any amount or range thereof described further herein.

[0223] The present invention further includes any organisms or parts thereof described herein (e.g., plants, descendants, cells, tissues, seeds, or parts thereof (e.g., oil seeds), or preparations or fractions thereof), as well as any oils produced by the organisms described herein. The invention also includes any products produced using the organisms, parts thereof, or oils described herein.

[0224] The present invention relates to a method to modify a product containing at least one fatty acid, comprising adding to the product an organism, part thereof, or oil produced by a genetically modified organism according to the invention and as described herein (e.g., a plant, descendant, cell, seed, tissue, or part thereof that has been genetically modified as described herein). Any products produced by this method or generally containing any organisms, parts thereof, or oils from the organisms described herein are also encompassed by the invention.

[0225] In some embodiments, the product is selected from a food dietary supplement, a pharmaceutical formulation, a humanized animal milk, an infant formula, a nutraceutical and a functional food. Suitable pharmaceutical formulations include, but are not limited to, an anti-inflammatory formulation, a chemotherapeutic agent, an active excipient, an osteoporosis drug, an anti-depressant, an anti-convulsant, an anti-Helicobacter pylori drug, a drug for treatment of neurodegenerative disease, a drug for treatment of degenerative liver disease, an antibiotic, and a cholesterol lowering formulation. In some embodiments, the product is used to treat a condition selected from chronic inflammation, acute inflammation, gastrointestinal disorder, cancer, cachexia, cardiac restenosis, neurodegenerative disorder, degenerative disorder of the liver, blood lipid disorder, osteoporosis, osteoarthritis, autoimmune disease, preeclampsia, preterm birth, age related maculopathy, pulmonary disorder, and peroxisomal disorder.

[0226] In some embodiments, the product is a food product or functional food product. Suitable food products include, but are not limited to, fine bakery wares, bread and rolls, breakfast cereals, processed and unprocessed cheese, condiments (ketchup, mayonnaise, etc.), dairy products (milk, yogurt), puddings and gelatin desserts, carbonated drinks, teas, powdered beverage mixes, processed fish products, fruit-based drinks, chewing gum, hard confectionery, frozen dairy products, processed meat products, nut and nut-based spreads, pasta, processed poultry products, gravies and sauces, potato chips and other chips or crisps, chocolate and other confectionery, soups and soup mixes, soya based products (e.g., milks, drinks, creams, whiteners), vegetable oil-based spreads, and vegetable-based drinks.

[0227] In some embodiments of the invention, the product is a feed or meal composition, or an additive for a feed or meal composition, for an animal. The term “animal” includes humans and non-humans. Non-limiting examples of animals are non-ruminants (e.g., pigs, poultry, or fish), and ruminants (e.g., cows, sheep and horses). The term feed or feed composition means any compound, preparation, mixture, or composition suitable for, or intended for intake by an animal.

[0228] In some embodiments, the invention is directed to an oil blend comprising an oil obtained from a genetically modified plant, descendant, tissue, or part thereof described herein, and another oil. In some embodiments, the another oil is seed oil, vegetable oil, fish oil, microbial oil, or mixture thereof.

[0229] In some embodiments, an oil obtained from a genetically modified plant, descendant, tissue, or part thereof described herein can be further processed to modify the LC-PUFAs in the oil, for example, to form esters and/or to purify the LC-PUFAs for medicinal purposes.

[0230] Some embodiments of the present invention are directed to a soybean oil comprising 0.05% to 15% DHA by weight of total fatty acids, or any range thereof described further herein. In some embodiments, the soybean oil further comprises 0.05% to 5% EPA by weight of total fatty acids. In some embodiments, the soybean oil further comprises 0.01% to 5% DPA(n-6) by weight of total fatty acids. In some embodiments, the soybean oil has a fatty acid profile of greater than 3.5% alpha-linolenic acid by weight of total fatty acids or any range thereof described further herein. Some embodiments of the present invention are directed to a composition comprising a soybean oil described herein. In some embodiments, the composition comprising a soybean oil comprises one or more oils. In some embodiments, the composition does not contain a PUFA (e.g., DHA) from a source that is not soybean.

[0231] Additional objects, advantages, and novel features of this invention will become apparent to those skilled in the art upon examination of the following examples thereof, which are not intended to be limiting.

### EXAMPLES

### Example 1

### Codon Optimization of PUFA Synthase OrfA, PUFA Synthase OrfB, PUFA Synthase OrfC, Acyl-CoA Synthetase and 4′ Phosphopantetheinyl Transferase HetI

[0232] Analysis of the DNA sequences encoding PUFA synthase OrfA from Schizochytrium sp. ATCC 20888 (GenBank ID: AF378327, GI:158518688), PUFA synthase OrfB from Schizochytrium sp. ATCC 20888 (GenBank ID: AF378328, GI:158518690), PUFA synthase chimeric OrfC from Schizochytrium sp. ATCC 20888 and Thraustochytrium (U.S. Appl. Pub. No. 2008/0022422, now U.S. Pat. No. 8,003,772, issued Aug. 23, 2011) (also described as “hybrid OrfC”), acyl-CoA synthetase from Schizochytrium sp. ATCC 20888 (U.S. Appl. Pub. No. 2007/0245431), and 4′ phosphopantetheinyl transferase HetI from Nostoc sp. PCC 7120 (GenBank ID: P37695, GI:20141367) revealed the presence of several sequence motifs containing non-optimal codon compositions that may be detrimental to optimal plant expression. The design of the gene(s) encoding PUFA synthase OrfA, PUFA synthase OrfB, PUFA synthase chimeric OrfC, acyl-CoA synthetase and 4′ phosphopantetheinyl transferase HetI proteins was optimized to generate a DNA sequence that is more “plant-like” in nature, and in which the sequence modifications do not hinder translation or create mRNA instability through non-optimal codon composition.

[0233] Due to the plasticity afforded by the redundancy/degeneracy of the genetic code (e.g., some amino acids are specified by more than one codon), evolution of the genomes in different organisms or classes of organisms has resulted in differential usage of synonymous codons. This “codon bias” is reflected in the mean base composition of protein coding regions. For example, organisms having genomes with relatively low G+C contents utilize more codons having A or T in the third position of synonymous codons, whereas those having higher G+C contents utilize more codons having G or C in the third position. Further, it is thought that the presence of “minor” codons within an mRNA may reduce the absolute translation rate of that mRNA, especially when the relative abundance of the charged tRNA corresponding to the minor codon is low. An extension of this reasoning is that the diminution of translation rate by individual minor codons would be at least additive for multiple minor codons. Therefore, mRNAs having high relative contents of minor codons would have correspondingly low translation rates. This rate would be reflected by correspondingly low levels of the encoded protein.

[0234] In engineering genes encoding a PUFA synthase OrfA, PUFA synthase OrfB, PUFA synthase chimeric OrfC, acyl-CoA synthetase and 4′ phosphopantetheinyl transferase HetI protein for expression in dicotyledonous plants (such as tobacco, soybean, cotton or canola), the codon usages for canola were accessed from publicly available databases (Table 1).

TABLE 1
Synonymous codon representation in coding regions of dicotyledonous
plants from Brassica napus (canola) genes (Columns C and G). Values for a balanced-biased
codon representation set for a plant-optimized synthetic gene design are in Columns D and H.

| A | | | D | | | | H |
|---|---|---|---|---|---|---|---|
| Amino | B | C | Weighted | E | F | G | Weighted |
| Acid | Codon | Canola % | Average | Amino Acid | Codon | Canola % | Average |
| ALA (A) | GCA | 23.3 | 23.3 | LEU (L) | CTA | 10.1 | DNU |
| | GCC | 21.2 | 21.2 | | CTC | 22.8 | 28.5 |
| | GCG | 14.2 | 14.2 | | CTG | 11.6 | 14.6 |
| | GCT | 41.3 | 41.3 | | CTT | 25.2 | 31.6 |
| ARG (R) | AGA | 31.8 | 43.8 | | TTA | 10.1 | DNU |
| | AGG | 22.1 | 30.5 | | TTG | 20.2 | 25.3 |
| | CGA | 9.9 | DNU | LYS (K) | AAA | 44.6 | 44.6 |
| | CGC | 8.9 | DNU | | AAG | 55.4 | 55.4 |
| | CGG | 8.6 | DNU | MET (M) | ATG | 100.0 | 100.0 |
| | CGT | 18.6 | 25.7 | PHE (F) | TTC | 58.6 | 58.6 |
| ASN (N) | AAC | 62.6 | 62.6 | | TTT | 41.4 | 41.4 |
| | AAT | 37.4 | 37.4 | PRO (P) | CCA | 29.6 | 29.6 |
| ASP (D) | GAC | 42.5 | 42.5 | | CCC | 14.6 | 14.6 |
| | GAT | 57.5 | 57.5 | | CCG | 18.4 | 18.4 |
| CYS (C) | TGC | 49.2 | 49.2 | | CCT | 37.3 | 37.3 |
| | TGT | 50.8 | 50.8 | SER (S) | AGC | 16.0 | 17.9 |
| END | TAA | 38.5 | DNU | | AGT | 14.1 | 15.8 |
| | TAG | 22.1 | DNU | | TCA | 18.2 | 20.4 |
| | TGA | 39.4 | 100.0 | | TCC | 16.7 | 18.7 |
| GLN (Q) | CAA | 50.0 | 50.0 | | TCG | 10.7 | DNU |
| | CAG | 50.0 | 50.0 | | TCT | 24.3 | 27.2 |
| GLU (E) | GAA | 43.6 | 43.6 | THR (T) | ACA | 26.3 | 26.3 |
| | GAG | 56.4 | 56.4 | | ACC | 26.9 | 26.9 |
| GLY (G) | GGA | 36.4 | 36.4 | | ACG | 16.9 | 16.9 |
| | GGC | 16.2 | 16.2 | | ACT | 30.0 | 30.0 |
| | GGG | 15.2 | 15.2 | TRP (W) | TGG | 100.0 | 100.0 |
| | GGT | 32.1 | 32.1 | TYR (Y) | TAC | 59.4 | 59.4 |
| HIS (H) | CAC | 49.6 | 49.6 | | TAT | 40.6 | 40.6 |
| | CAT | 50.4 | 50.4 | VAL (V) | GTA | 10.8 | DNU |
| ILE (I) | ATA | 21.1 | 21.1 | | GTC | 24.1 | 27.0 |
| | ATC | 42.7 | 42.7 | | GTG | 28.3 | 31.7 |
| | ATT | 36.2 | 36.2 | | GTT | 36.8 | 41.3 |

*DNU—Do Not Use

[0235] To balance the distribution of the remaining codon choices for an amino acid, a Weighted Average representation for each codon was calculated (Table 1), using the formula: Weighted Average % of C1=1/(% C1+% C2+% C3+ etc.)×% C1×100, where C1 is the codon in question and % C2, % C3, etc. represent the averages of the % values for canola of remaining synonymous codons (average % values for the relevant codons are taken from Columns C and G) of Table 1. The Weighted Average % value for each codon is given in Columns D and H of Table 1.

[0236] In designing coding regions for plant expression, the primary (“first choice”) codons preferred by the plant was determined, as well as the second, third, fourth etc. choices of preferred codons when multiple choices exist. A new DNA sequence was then designed that encoded essentially the same amino acid sequence of an PUFA synthase OrfA, PUFA synthase OrfB, PUFA synthase OrfC, acyl-CoA synthetase and 4′ phosphopantetheinyl transferase HetI, but that differed from the original DNA sequence (encoding the PUFA synthase OrfA, PUFA synthase OrfB, PUFA synthase chimeric OrfC, acyl-CoA synthetase and 4′ phosphopantetheinyl transferase HetI) by the substitution of plant (first preferred, second preferred, third preferred, or fourth preferred, etc.) codons to specify the amino acid at each position within the amino acid sequence.

[0237] The new sequences were then analyzed for restriction enzyme sites created by the modifications in the sequence. The identified sites were then modified by replacing the codons with first, second, third, or fourth choice preferred codons. The sequence was then further analyzed and modified to reduce the frequency of TA or GC doublets.

[0238] Analysis of these sequences revealed that the new DNA sequences encoded essentially the amino acid sequence of the PUFA synthase OrfA, PUFA synthase OrfB, PUFA synthase chimeric OrfC, acyl-CoA synthetase and 4′ phosphopantetheinyl transferase HetI proteins but were respectively designed for optimal expression in dicotyledonous plants using a balanced codon distribution of frequently used codons found in canola genes. In particular, the new DNA sequences differed from the original DNA sequences encoding an PUFA synthase OrfA, PUFA synthase OrfB, PUFA synthase chimeric OrfC, acyl-CoA synthetase and 4′ phosphopantetheinyl transferase HetI by the substitution of plant (first preferred, second preferred, third preferred, or fourth preferred) codons to specify the appropriate amino acid at each position within the protein amino acid sequence.

[0239] Design of the plant-optimized DNA sequences were initiated by reverse-translation of the protein sequences of PUFA synthase OrfA (SEQ ID NO: 1), PUFA synthase OrfB (SEQ ID NO: 2), PUFA synthase chimeric OrfC (SEQ ID NO: 3), acyl-CoA synthetase (SEQ ID NO: 4) and 4′ phosphopantetheinyl transferase HetI (SEQ ID NO: 5) using a canola codon bias table constructed from Table 1, Columns D and H. The protein sequence for acyl-CoA synthetase (SEQ ID NO: 4) was altered from the original sequence; wherein the second amino acid Alanine was removed from the protein. The initial sequences were then modified by compensating codon changes (while retaining overall weighted average codon representation) to remove or add restriction enzyme recognition sites, remove highly stable intrastrand secondary structures, and remove other sequences that might be detrimental to cloning manipulations or expression of the engineered gene in plants. The DNA sequences were then re-analyzed for restriction enzyme recognition sites that might have been created by the modifications. The identified sites were further modified by replacing the relevant codons with first, second, third, or fourth choice preferred codons. Other sites in the sequences that could affect transcription or translation of the gene of interest include the exon:intron junctions (5′ or 3′), poly A addition signals, or RNA polymerase termination signals. The modified sequences were further analyzed and further modified to reduce the frequency of TA or CG doublets, and to increase the frequency of TG or CT doublets. In addition to these doublets, sequence blocks that have more than about six consecutive residues of [G+C] or [A+T] can affect transcription or translation of the sequence. Therefore, these sequence blocks were also modified by replacing the codons of first or second choice, etc. with other preferred codons of choice. Rarely used codons are not included to a substantial extent in the gene design, being used only when necessary to accommodate a different design criterion than codon composition per se (e.g., addition or deletion of restriction enzyme recognition sites).

[0240] The protein encoded by PUFA synthase OrfA comprises 10 repeated “Proline-Alanine” domains ranging in size from 17 to 29 amino acids. Interspersed between the Proline-Alanine repeats were 9 longer repeated sequence domains comprising 87 amino acids. The amino acid sequences of these repeats vary at only 4 positions, and there were only two codon choices at each of the variant positions. Analyses of the amino acid sequences of the 9 repeats using the Clustal W computer program generated a homology value of 100%, and an identity value of 95.4%. At the DNA level, the sequences encoding the 9 repeats are 100%) homologous, 89.7% identical, varying at only 27 positions in the 261 bases encoding each repeat (23 of the 27 changes are “silent” differences, in which synonymous codons for the same amino acid are interchanged).

[0241] Standard gene design processes cannot easily accommodate developing new codon biased DNA sequences for multiple repeats of this size, since one must continually balance all the codon choices in an individual repeat with the codon choices made at the same position in the other 8 repeats, to avoid generating highly related DNA sequences. For each of the 87 residue repeats, there were more than 4.5×10⁴³ possible DNA sequences to encode the same amino acid sequence (calculated as the product of the number of synonymous codons for each amino acid in the sequence). Thus, there was a very large computing space available to generate identically-encoding DNA sequences. The following protocol describes a method used to generate (in silico) multiple sequence designs for each individual repeat, followed by comparison of all the sequence versions in bulk to identify a set that represents highly diverged sequences encoding the repeats:

[0242] Step 1: Extract the native DNA sequence encoding each repeated amino acid domain as a separate sequence.

[0243] Step 2: Import the individual repeated DNA sequences as separate sequences into a gene design program (e.g., OPTGENE™, Ocimum Biosolutions, Hyderabad, India). Steps 3-5 are performed on each sequence separately.

[0244] Step 3: Translate the DNA sequence using the standard genetic code.

[0245] Step 4: Reverse translate the translated protein sequence using the standard genetic code and the appropriate codon bias table. In this example, a biased codon table compiled from 530 Brassica napus protein coding regions was used, and each generated sequence was code-named “nap” (for “napus”) plus the version number. Thus, the first reverse-translated, codon biased sequence for Repeat 1 was named “rpt1 nap1.” In this illustration, this process was performed 10 times, to generate 10 DNA sequence versions encoding the protein sequence of Repeat 1.

[0246] Step 5: Export the 10 sequence versions into the corresponding number of text files.

[0247] Step 6: Repeat Steps 3-5 for each of the other repeated sequence domains. In this illustration, a total of 90 “nap” sequence versions were generated (10 for each repeated element).

[0248] Step 7: Import the 90 sequence files into the Clustal W program Mega 3.1 (accessed at Megasoftware) and perform a multiple sequence alignment using all 90 sequences as input. Because these sequences are segments of protein coding regions, the alignments are performed with no gaps allowed. After Clustal W Alignment, a Neighbor-Joining tree is assembled and visualized, and one of the ten codon-optimized sequences for each of the nine repeated domains in the protein is picked visually. Each selected sequence version is chosen from a section of the tree that is the most deeply branched.

[0249] Step 8: The chosen sequence for each repeated domain is incorporated into the codon-optimized DNA sequence encoding the entire protein, in the proper position for each particular repeat.

[0250] Step 9: Final analyses of the entire codon optimized sequence, including the separately designed diverged repeat elements, are performed to assure the absence of undesired motifs, restriction enzyme recognition sites, etc.

[0251] Employing this method with the codon optimization of the PUFA synthase OrfA coding sequence resulted in the selection of repeated Proline-Alanine sequences that are sufficiently diverged to avoid repeated sequence instability. These sequences were chosen from the deepest branches of the Neighbor-Joining tree (i.e., are the most distantly related to one another in this sequence set). Smith-Wasserman global alignments were done for all pair wise combinations and the range of homology was 74-81% with a probable median of 76-77% (Table 2).

TABLE 2
Smith-Wasserman homologies of selected codon-optimized sequences of
repeats of PUFA OrfA.

| | rpt1 nap9 | rpt2 nap10 | rpt3 nap10 | rpt4 nap1 | rpt5 nap 10 | rpt6 nap6 | rpt7 nap9 | rpt8 nap4 | rpt9 nap10 |
|---|---|---|---|---|---|---|---|---|---|
| rpt1 nap9 | 100 | 77 | 74 | 77 | 74 | 77 | 81 | 76 | 76 |
| rpt2 nap10 | | 100 | 81 | 76 | 74 | 77 | 79 | 76 | 77 |
| rpt3 nap10 | | | 100 | 79 | 80 | 74 | 74 | 76 | 78 |
| rpt4 nap1 | | | | 100 | 80 | 77 | 75 | 76 | 76 |
| rpt5 nap10 | | | | | 100 | 78 | 77 | 77 | 77 |
| rpt6 nap6 | | | | | | 100 | 78 | 76 | 77 |
| rpt7 nap9 | | | | | | | 100 | 75 | 74 |
| rpt8 nap4 | | | | | | | | 100 | 76 |
| rpt9 nap10 | | | | | | | | | 100 |

[0252] A Clustal W alignment (Vector NTI, Invitrogen, Carlsbad, Calif.) of the chosen 9 newly designed coding regions for the 9 repeated domains is shown in FIG. 1. Overall, the sequences are 93.1% homologous, 61.7% identical as compared to the original sequences, which were 100% homologous and 89.7% identical. Greater sequence divergence could be achieved by using more than 10 sequence iterations and employing a computer program or mathematical algorithm to select from these sequences (instead of choosing sequences visually). Nevertheless, the sequences exemplified are highly divergent, and produced stable poly-nucleotide fragments.

[0253] The newly designed, canola optimized PUFA synthase OrfA, PUFA synthase OrfB, PUFA synthase chimeric OrfC, acyl-CoA synthetase and 4′ phosphopantetheinyl transferase HetI DNA sequences are listed, respectively, in SEQ ID NO: 6, SEQ ID NO: 7, SEQ ID NO: 8, SEQ ID NO: 9 and SEQ ID NO: 10. These codon optimized sequences are identified as version 3 (v3) throughout the specification, whereas the sequences that are non-codon optimized are referred to as version 2 (v2) throughout the specification.

[0254] The resulting DNA sequences have a higher degree of codon diversity, a desirable base composition, contain strategically placed restriction enzyme recognition sites, and lack sequences that might interfere with transcription of the gene, or translation of the product mRNA. Table 3, Table 4, Table 5, Table 6 and Table 7 present the comparisons of the codon compositions of the coding regions for the PUFA synthase OrfA, PUFA synthase OrfB, PUFA synthase chimeric OrfC, acyl-CoA synthetase and 4′ phosphopantetheinyl transferase HetI proteins found in the original gene, the plant-optimized versions and the codon composition recommendations for a plant optimized sequence as calculated from Table 1, Columns D and H.

TABLE 3
PUFA OrfA codon compositions

| Amino | | Original | Original | Plnt Opt | Plnt Opt | Plnt Opt | Amino | | Original | Original | Plnt Opt | Plnt Opt | Plnt Opt |
|---|---|---|---|---|---|---|---|---|---|---|---|---|---|
| Acid | Codon | Gene # | Gene % | Gene # | Gene % | Recm'd | Acid | Codon | Gene # | Gene % | Gene # | Gene % | Recm'd |
| ALA (A) | GCA | 7 | 1.5 | 109 | 23.3 | 23.3 | LEU (L) | CTA | 0 | 0.0 | 0 | 0.0 | 0.0 |
| | GCC | 302 | 64.5 | 99 | 21.2 | 21.2 | | CTC | 173 | 77.9 | 63 | 28.4 | 28.5 |
| | GCG | 49 | 10.5 | 67 | 14.3 | 14.2 | | CTG | 15 | 6.8 | 32 | 14.4 | 14.6 |
| | GCT | 110 | 23.5 | 193 | 41.2 | 41.3 | | CTT | 33 | 14.9 | 71 | 32.0 | 31.6 |
| ARG (R) | AGA | 0 | 0.0 | 57 | 43.5 | 43.8 | | TTA | 0 | 0.0 | 0 | 0.0 | 0.0 |
| | AGG | 0 | 0.0 | 40 | 30.5 | 30.5 | | TTG | 1 | 0.5 | 56 | 25.2 | 25.3 |
| | CGA | 0 | 0.0 | 0 | 0.0 | 0.0 | LYS (K) | AAA | 2 | 1.2 | 73 | 44.5 | 44.6 |
| | CGC | 112 | 85.5 | 0 | 0.0 | 0.0 | | AAG | 162 | 98.8 | 91 | 55.5 | 55.4 |
| | CGG | 1 | 0.8 | 0 | 0.0 | 0.0 | MET (M) | ATG | 88 | 100 | 88 | 100 | 100.0 |
| | CGT | 18 | 13.7 | 34 | 26.0 | 25.7 | PHE (F) | TTC | 50 | 69.4 | 42 | 58.3 | 58.6 |
| ASN (N) | AAC | 73 | 97.3 | 47 | 62.7 | 62.6 | | TTT | 22 | 30.6 | 30 | 41.7 | 41.4 |
| | AAT | 2 | 2.7 | 28 | 37.3 | 37.4 | PRO (P) | CCA | 2 | 1.3 | 45 | 30.0 | 29.6 |
| ASP (D) | GAC | 126 | 76.8 | 70 | 42.7 | 42.5 | | CCC | 56 | 37.3 | 22 | 14.7 | 14.6 |
| | GAT | 38 | 23.2 | 94 | 57.3 | 57.5 | | CCG | 46 | 30.7 | 27 | 18.0 | 18.4 |
| CYS (C) | TGC | 34 | 94.4 | 18 | 50.0 | 49.2 | | CCT | 46 | 30.7 | 56 | 37.3 | 37.3 |
| | TGT | 2 | 5.6 | 18 | 50.0 | 50.8 | SER (S) | AGC | 40 | 21.3 | 34 | 18.1 | 17.9 |
| END | TAA | 1 | 100.0 | 0 | 0.0 | 0.0 | | AGT | 1 | 0.5 | 30 | 16.0 | 15.8 |
| | TAG | 0 | 0.0 | 0 | 0.0 | 0.0 | | TCA | 0 | 0.0 | 38 | 20.2 | 20.4 |
| | TGA | 0 | 0.0 | 1 | 100.0 | 100.0 | | TCC | 70 | 37.2 | 35 | 18.6 | 18.7 |
| GLN (Q) | CAA | 4 | 4.4 | 46 | 50.5 | 50.0 | | TCG | 59 | 31.4 | 0 | 0.0 | 0.0 |
| | CAG | 87 | 95.6 | 45 | 49.5 | 50.0 | | TCT | 18 | 9.6 | 51 | 27.1 | 27.2 |
| GLU | GAA | 9 | 3.8 | 103 | 43.6 | 43.6 | THR (T) | ACA | 2 | 1.3 | 41 | 26.3 | 26.3 |
| (E) 16 | GAG | 227 | 96.2 | 133 | 56.4 | 56.4 | | ACC | 81 | 51.9 | 42 | 26.9 | 26.9 |
| GLY (G) | GGA | 6 | 3.1 | 71 | 36.2 | 36.4 | | ACG | 26 | 16.7 | 26 | 16.7 | 16.9 |
| | GGC | 156 | 79.6 | 32 | 16.3 | 16.2 | | ACT | 47 | 30.1 | 47 | 30.1 | 30.0 |
| | GGG | 0 | 0.0 | 30 | 15.3 | 15.2 | TRP (W) | TGG | 13 | 100 | 13 | 100 | 100.0 |
| | GGT | 34 | 17.3 | 63 | 32.1 | 32.1 | TYR (Y) | TAC | 42 | 97.7 | 26 | 60.5 | 59.4 |
| HIS (H) | CAC | 25 | 83.3 | 15 | 50.0 | 49.6 | | TAT | 1 | 2.3 | 17 | 39.5 | 40.6 |
| | CAT | 5 | 16.7 | 15 | 50.0 | 50.4 | VAL (V) | GTA | 0 | 0.0 | 0 | 0.0 | 0.0 |
| ILE (I) | ATA | 0 | 0.0 | 29 | 21.0 | 21.1 | | GTC | 176 | 70.7 | 67 | 26.9 | 27.0 |
| | ATC | 99 | 71.7 | 59 | 42.8 | 42.7 | | GTG | 39 | 15.7 | 79 | 31.7 | 31.7 |
| | ATT | 39 | 28.3 | 50 | 36.2 | 36.2 | | GTT | 34 | 13.7 | 103 | 41.4 | 41.3 |
| | Totals | 1566 | | 1566 | | | | Totals | 1345 | | 1345 | | |

TABLE 4
PUFA OrfB codon compositions

| Amino | | Original | Original | Plnt Opt | Plnt Opt | Plnt Opt | Amino | | Original | Original | Plnt Opt | Plnt Opt | Plnt Opt |
|---|---|---|---|---|---|---|---|---|---|---|---|---|---|
| Acid | Codon | Gene # | Gene % | Gene # | Gene % | Recm'd | Acid | Codon | Gene # | Gene % | Gene # | Gene % | Recm'd |
| ALA (A) | GCA | 13 | 5.7 | 53 | 23.2 | 23.3 | LEU (L) | CTA | 0 | 0.0 | 0 | 0.0 | 0.0 |
| | GCC | 135 | 59.2 | 48 | 21.1 | 21.2 | | CTC | 116 | 63.0 | 51 | 27.7 | 28.5 |
| | GCG | 43 | 18.9 | 34 | 14.9 | 14.2 | | CTG | 21 | 11.4 | 27 | 14.7 | 14.6 |
| | GCT | 37 | 16.2 | 93 | 40.8 | 41.3 | | CTT | 44 | 23.9 | 59 | 32.1 | 31.6 |
| ARG (R) | AGA | 0 | 0.0 | 54 | 45.0 | 43.8 | | TTA | 0 | 0.0 | 0 | 0.0 | 0.0 |
| | AGG | 0 | 0.0 | 36 | 30.0 | 30.5 | | TTG | 3 | 1.6 | 47 | 25.5 | 25.3 |
| | CGA | 1 | 0.8 | 0 | 0.0 | 0.0 | LYS (K) | AAA | 10 | 8.8 | 52 | 45.6 | 44.6 |
| | CGC | 95 | 79.2 | 0 | 0.0 | 0.0 | | AAG | 104 | 91.2 | 62 | 54.4 | 55.4 |
| | CGG | 1 | 0.8 | 0 | 0.0 | 0.0 | MET (M) | ATG | 45 | 100 | 45 | 100 | 100.0 |
| | CGT | 23 | 19.2 | 30 | 25.0 | 25.7 | PHE (F) | TTC | 33 | 47.8 | 41 | 59.4 | 58.6 |
| ASN (N) | AAC | 75 | 89.3 | 51 | 60.7 | 62.6 | | TTT | 36 | 52.2 | 28 | 40.6 | 41.4 |
| | AAT | 9 | 10.7 | 33 | 39.3 | 37.4 | PRO (P) | CCA | 8 | 7.2 | 33 | 29.7 | 29.6 |
| ASP (D) | GAC | 86 | 72.3 | 52 | 43.7 | 42.5 | | CCC | 47 | 42.3 | 16 | 14.4 | 14.6 |
| | GAT | 33 | 27.7 | 67 | 56.3 | 57.5 | | CCG | 35 | 31.5 | 20 | 18.0 | 18.4 |
| CYS (C) | TGC | 41 | 100.0 | 20 | 48.8 | 49.2 | | CCT | 21 | 18.9 | 42 | 37.8 | 37.3 |
| | TGT | 0 | 0.0 | 21 | 51.2 | 50.8 | SER (S) | AGC | 40 | 26.5 | 28 | 18.5 | 17.9 |
| END | TAA | 1 | 100.0 | 0 | 0.0 | 0.0 | | AGT | 7 | 4.6 | 24 | 15.9 | 15.8 |
| | TAG | 0 | 0.0 | 0 | 0.0 | 0.0 | | TCA | 2 | 1.3 | 31 | 20.5 | 20.4 |
| | TGA | 0 | 0.0 | 1 | 100.0 | 100.0 | | TCC | 55 | 36.4 | 28 | 18.5 | 18.7 |
| GLN (Q) | CAA | 8 | 13.6 | 30 | 50.8 | 50.0 | | TCG | 33 | 21.9 | 0 | 0.0 | 0.0 |
| | CAG | 51 | 86.4 | 29 | 49.2 | 50.0 | | TCT | 14 | 9.3 | 40 | 26.5 | 27.2 |
| GLU | GAA | 33 | 24.8 | 58 | 43.6 | 43.6 | THR (T) | ACA | 8 | 8.1 | 28 | 28.3 | 26.3 |
| (E) 16 | GAG | 100 | 75.2 | 75 | 56.4 | 56.4 | | ACC | 58 | 58.6 | 24 | 24.2 | 26.9 |
| GLY (G) | GGA | 11 | 7.2 | 55 | 36.2 | 36.4 | | ACG | 26 | 26.3 | 16 | 16.2 | 16.9 |
| | GGC | 102 | 67.1 | 25 | 16.4 | 16.2 | | ACT | 7 | 7.1 | 31 | 31.3 | 30.0 |
| | GGG | 3 | 2.0 | 23 | 15.1 | 15.2 | TRP (W) | TGG | 22 | 100 | 22 | 100 | 100.0 |
| | GGT | 36 | 23.7 | 49 | 32.2 | 32.1 | TYR (Y) | TAC | 51 | 91.1 | 32 | 57.1 | 59.4 |
| HIS (H) | CAC | 29 | 76.3 | 19 | 50.0 | 49.6 | | TAT | 5 | 8.9 | 24 | 42.9 | 40.6 |
| | CAT | 9 | 23.7 | 19 | 50.0 | 50.4 | VAL (V) | GTA | 1 | 0.8 | 0 | 0.0 | 0.0 |
| ILE (I) | ATA | 0 | 0.0 | 22 | 21.2 | 21.1 | | GTC | 85 | 65.4 | 34 | 26.2 | 27.0 |
| | ATC | 67 | 64.4 | 44 | 42.3 | 42.7 | | GTG | 30 | 23.1 | 42 | 32.3 | 31.7 |
| | ATT | 37 | 35.6 | 38 | 36.5 | 36.2 | | GTT | 14 | 10.8 | 54 | 41.5 | 41.3 |
| | Totals | 1079 | | 1079 | | | | Totals | 981 | | 981 | | |

TABLE 5
PUFA chimeric OrfC codon compositions

| Amino | | Original | Original | Plnt Opt | Plnt Opt | Plnt Opt | Amino | | Original | Original | Plnt Opt | Plnt Opt | Plnt Opt |
|---|---|---|---|---|---|---|---|---|---|---|---|---|---|
| Acid | Codon | Gene # | Gene % | Gene # | Gene % | Recm'd | Acid | Codon | Gene # | Gene % | Gene # | Gene % | Recm'd |
| ALA (A) | GCA | 18 | 14.0 | 30 | 23.3 | 23.3 | LEU (L) | CTA | 2 | 1.6 | 0 | 0.0 | 0.0 |
| | GCC | 84 | 65.1 | 28 | 21.7 | 21.2 | | CTC | 78 | 63.9 | 34 | 27.9 | 28.5 |
| | GCG | 14 | 10.9 | 19 | 14.7 | 14.2 | | CTG | 18 | 14.8 | 18 | 14.8 | 14.6 |
| | GCT | 13 | 10.1 | 52 | 40.3 | 41.3 | | CTT | 16 | 13.1 | 39 | 32.0 | 31.6 |
| ARG (R) | AGA | 1 | 1.3 | 33 | 44.0 | 43.8 | | TTA | 1 | 0.8 | 0 | 0.0 | 0.0 |
| | AGG | 1 | 1.3 | 23 | 30.7 | 30.5 | | TTG | 7 | 5.7 | 31 | 25.4 | 25.3 |
| | CGA | 6 | 8.0 | 0 | 0.0 | 0.0 | LYS (K) | AAA | 15 | 16.1 | 42 | 45.2 | 44.6 |
| | CGC | 53 | 70.7 | 0 | 0.0 | 0.0 | | AAG | 78 | 83.9 | 51 | 54.8 | 55.4 |
| | CGG | 3 | 4.0 | 0 | 0.0 | 0.0 | MET (M) | ATG | 48 | 100 | 48 | 100 | 100.0 |
| | CGT | 11 | 14.7 | 19 | 25.3 | 25.7 | PHE (F) | TTC | 40 | 58.8 | 40 | 58.8 | 58.6 |
| ASN (N) | AAC | 63 | 90.0 | 43 | 61.4 | 62.6 | | TTT | 28 | 41.2 | 28 | 41.2 | 41.4 |
| | AAT | 7 | 10.0 | 27 | 38.6 | 37.4 | PRO (P) | CCA | 10 | 11.2 | 27 | 30.3 | 29.6 |
| ASP (D) | GAC | 70 | 76.9 | 40 | 44.0 | 42.5 | | CCC | 35 | 39.3 | 13 | 14.6 | 14.6 |
| | GAT | 21 | 23.1 | 51 | 56.0 | 57.5 | | CCG | 26 | 29.2 | 16 | 18.0 | 18.4 |
| CYS (C) | TGC | 26 | 81.3 | 16 | 50.0 | 49.2 | | CCT | 18 | 20.2 | 33 | 37.1 | 37.3 |
| | TGT | 6 | 18.8 | 16 | 50.0 | 50.8 | SER (S) | AGC | 16 | 19.0 | 13 | 15.5 | 17.9 |
| END | TAA | 1 | 100.0 | 0 | 0.0 | 0.0 | | AGT | 3 | 3.6 | 14 | 16.7 | 15.8 |
| | TAG | 0 | 0.0 | 0 | 0.0 | 0.0 | | TCA | 9 | 10.7 | 18 | 21.4 | 20.4 |
| | TGA | 0 | 0.0 | 1 | 100.0 | 100.0 | | TCC | 28 | 33.3 | 16 | 19.0 | 18.7 |
| GLN (Q) | CAA | 11 | 24.4 | 25 | 55.6 | 50.0 | | TCG | 21 | 25.0 | 0 | 0.0 | 0.0 |
| | CAG | 34 | 75.6 | 20 | 44.4 | 50.0 | | TCT | 7 | 8.3 | 23 | 27.4 | 27.2 |
| GLU | GAA | 17 | 19.1 | 40 | 44.9 | 43.6 | THR (T) | ACA | 4 | 6.2 | 17 | 26.2 | 26.3 |
| (E) 16 | GAG | 72 | 80.9 | 49 | 55.1 | 56.4 | | ACC | 41 | 63.1 | 17 | 26.2 | 26.9 |
| GLY (G) | GGA | 21 | 17.9 | 43 | 36.8 | 36.4 | | ACG | 8 | 12.3 | 11 | 16.9 | 16.9 |
| | GGC | 78 | 66.7 | 18 | 15.4 | 16.2 | | ACT | 12 | 18.5 | 20 | 30.8 | 30.0 |
| | GGG | 7 | 6.0 | 18 | 15.4 | 15.2 | TRP (W) | TGG | 18 | 100 | 18 | 100 | 100.0 |
| | GGT | 11 | 9.4 | 38 | 32.5 | 32.1 | TYR (Y) | TAC | 41 | 87.2 | 28 | 59.6 | 59.4 |
| HIS (H) | CAC | 24 | 85.7 | 14 | 50.0 | 49.6 | | TAT | 6 | 12.8 | 19 | 40.4 | 40.6 |
| | CAT | 4 | 14.3 | 14 | 50.0 | 50.4 | VAL (V) | GTA | 6 | 5.3 | 0 | 0.0 | 0.0 |
| ILE (I) | ATA | 0 | 0.0 | 15 | 21.7 | 21.1 | | GTC | 62 | 54.4 | 31 | 27.2 | 27.0 |
| | ATC | 48 | 69.6 | 30 | 43.5 | 42.7 | | GTG | 24 | 21.1 | 37 | 32.5 | 31.7 |
| | ATT | 21 | 30.4 | 24 | 34.8 | 36.2 | | GTT | 22 | 19.3 | 46 | 40.4 | 41.3 |
| | Totals | 746 | | 746 | | | | Totals | 748 | | 748 | | |

TABLE 6
Acyl-CoA synthetase codon compositions

| Amino | | Original | Original | Plnt Opt | Plnt Opt | Plnt Opt | Amino | | Original | Original | Plnt Opt | Plnt Opt | Plnt Opt |
|---|---|---|---|---|---|---|---|---|---|---|---|---|---|
| Acid | Codon | Gene # | Gene % | Gene # | Gene % | Recm'd | Acid | Codon | Gene # | Gene % | Gene # | Gene % | Recm'd |
| ALA (A) | GCA | 2 | 2.3 | 21 | 24.7 | 23.3 | LEU (L) | CTA | 0 | 0.0 | 0 | 0.0 | 0.0 |
| | GCC | 59 | 68.6 | 18 | 21.2 | 21.2 | | CTC | 35 | 63.6 | 15 | 27.3 | 28.5 |
| | GCG | 11 | 12.8 | 12 | 14.1 | 14.2 | | CTG | 6 | 10.9 | 9 | 16.4 | 14.6 |
| | GCT | 14 | 16.3 | 34 | 40.0 | 41.3 | | CTT | 13 | 23.6 | 17 | 30.9 | 31.6 |
| ARG (R) | AGA | 0 | 0.0 | 14 | 43.8 | 43.8 | | TTA | 0 | 0.0 | 0 | 0.0 | 0.0 |
| | AGG | 3 | 9.4 | 10 | 31.3 | 30.5 | | TTG | 1 | 1.8 | 14 | 25.5 | 25.3 |
| | CGA | 0 | 0.0 | 0 | 0.0 | 0.0 | LYS (K) | AAA | 2 | 4.1 | 22 | 44.9 | 44.6 |
| | CGC | 25 | 78.1 | 0 | 0.0 | 0.0 | | AAG | 47 | 95.9 | 27 | 55.1 | 55.4 |
| | CGG | 0 | 0.0 | 0 | 0.0 | 0.0 | MET (M) | ATG | 21 | 100 | 21 | 100 | 100.0 |
| | CGT | 4 | 12.5 | 8 | 25.0 | 25.7 | PHE (F) | TTC | 16 | 51.6 | 18 | 58.1 | 58.6 |
| ASN (N) | AAC | 22 | 95.7 | 14 | 60.9 | 62.6 | | TTT | 15 | 48.4 | 13 | 41.9 | 41.4 |
| | AAT | 1 | 4.3 | 9 | 39.1 | 37.4 | PRO (P) | CCA | 0 | 0.0 | 11 | 30.6 | 29.6 |
| ASP (D) | GAC | 38 | 74.5 | 22 | 43.1 | 42.5 | | CCC | 20 | 55.6 | 5 | 13.9 | 14.6 |
| | GAT | 13 | 25.5 | 29 | 56.9 | 57.5 | | CCG | 9 | 25.0 | 7 | 19.4 | 18.4 |
| CYS (C) | TGC | 11 | 91.7 | 6 | 50.0 | 49.2 | | CCT | 7 | 19.4 | 13 | 36.1 | 37.3 |
| | TGT | 1 | 8.3 | 6 | 50.0 | 50.8 | SER (S) | AGC | 7 | 17.5 | 7 | 17.5 | 17.9 |
| END | TAA | 1 | 100.0 | 0 | 0.0 | 0.0 | | AGT | 4 | 10.0 | 6 | 15.0 | 15.8 |
| | TAG | 0 | 0.0 | 0 | 0.0 | 0.0 | | TCA | 1 | 2.5 | 8 | 20.0 | 20.4 |
| | TGA | 0 | 0.0 | 1 | 100.0 | 100.0 | | TCC | 19 | 47.5 | 8 | 20.0 | 18.7 |
| GLN (Q) | CAA | 3 | 18.8 | 8 | 50.0 | 50.0 | | TCG | 7 | 17.5 | 0 | 0.0 | 0.0 |
| | CAG | 13 | 81.3 | 8 | 50.0 | 50.0 | | TCT | 2 | 5.0 | 11 | 27.5 | 27.2 |
| GLU | GAA | 11 | 17.7 | 27 | 43.5 | 43.6 | THR (T) | ACA | 1 | 2.0 | 13 | 25.5 | 26.3 |
| (E) 16 | GAG | 51 | 82.3 | 35 | 56.5 | 56.4 | | ACC | 27 | 52.9 | 14 | 27.5 | 26.9 |
| GLY (G) | GGA | 5 | 7.4 | 25 | 36.8 | 36.4 | | ACG | 19 | 37.3 | 9 | 17.6 | 16.9 |
| | GGC | 49 | 72.1 | 11 | 16.2 | 16.2 | | ACT | 4 | 7.8 | 15 | 29.4 | 30.0 |
| | GGG | 0 | 0.0 | 10 | 14.7 | 15.2 | TRP (W) | TGG | 10 | 100 | 10 | 100 | 100.0 |
| | GGT | 14 | 20.6 | 22 | 32.4 | 32.1 | TYR (Y) | TAC | 18 | 85.7 | 12 | 57.1 | 59.4 |
| HIS (H) | CAC | 10 | 83.3 | 6 | 50.0 | 49.6 | | TAT | 3 | 14.3 | 9 | 42.9 | 40.6 |
| | CAT | 2 | 16.7 | 6 | 50.0 | 50.4 | VAL (V) | GTA | 0 | 0.0 | 0 | 0.0 | 0.0 |
| ILE (I) | ATA | 0 | 0.0 | 10 | 21.3 | 21.1 | | GTC | 34 | 58.6 | 16 | 27.6 | 27.0 |
| | ATC | 27 | 57.4 | 20 | 42.6 | 42.7 | | GTG | 9 | 15.5 | 19 | 32.8 | 31.7 |
| | ATT | 20 | 42.6 | 17 | 36.2 | 36.2 | | GTT | 15 | 25.9 | 23 | 39.7 | 41.3 |
| | Totals | 410 | | 409 | | | | Totals | 372 | | 372 | | |

TABLE 7
Phosphopantetheinyl transferase HetI codon compositions

| Amino | | Original | Original | Plnt Opt | Plnt Opt | Plnt Opt | Amino | | Original | Original | Plnt Opt | Plnt Opt | Plnt Opt |
|---|---|---|---|---|---|---|---|---|---|---|---|---|---|
| Acid | Codon | Gene # | Gene % | Gene # | Gene % | Recm'd | Acid | Codon | Gene # | Gene % | Gene # | Gene % | Recm'd |
| ALA (A) | GCA | 4 | 20.0 | 5 | 25.0 | 23.3 | LEU (L) | CTA | 6 | 17.1 | 0 | 0.0 | 0.0 |
| | GCC | 6 | 30.0 | 4 | 20.0 | 21.2 | | CTC | 4 | 11.4 | 10 | 28.6 | 28.5 |
| | GCG | 2 | 10.0 | 3 | 15.0 | 14.2 | | CTG | 0 | 0.0 | 5 | 14.3 | 14.6 |
| | GCT | 8 | 40.0 | 8 | 40.0 | 41.3 | | CTT | 3 | 8.6 | 11 | 31.4 | 31.6 |
| ARG (R) | AGA | 1 | 6.3 | 6 | 37.5 | 43.8 | | TTA | 14 | 40.0 | 0 | 0.0 | 0.0 |
| | AGG | 1 | 6.3 | 5 | 31.3 | 30.5 | | TTG | 8 | 22.9 | 9 | 25.7 | 25.3 |
| | CGA | 2 | 12.5 | 0 | 0.0 | 0.0 | LYS (K) | AAA | 10 | 90.9 | 5 | 45.5 | 44.6 |
| | CGC | 6 | 37.5 | 0 | 0.0 | 0.0 | | AAG | 1 | 9.1 | 6 | 54.5 | 55.4 |
| | CGG | 1 | 6.3 | 0 | 0.0 | 0.0 | MET (M) | ATG | 1 | 100 | 1 | 100 | 100.0 |
| | CGT | 5 | 31.3 | 5 | 31.3 | 25.7 | PHE (F) | TTC | 3 | 25.0 | 6 | 50.0 | 58.6 |
| ASN (N) | AAC | 3 | 50.0 | 4 | 66.7 | 62.6 | | TTT | 9 | 75.0 | 6 | 50.0 | 41.4 |
| | AAT | 3 | 50.0 | 2 | 33.3 | 37.4 | PRO (P) | CCA | 9 | 56.3 | 5 | 31.3 | 29.6 |
| ASP (D) | GAC | 3 | 25.0 | 5 | 41.7 | 42.5 | | CCC | 6 | 37.5 | 2 | 12.5 | 14.6 |
| | GAT | 9 | 75.0 | 7 | 58.3 | 57.5 | | CCG | 1 | 6.3 | 3 | 18.8 | 18.4 |
| CYS (C) | TGC | 0 | 0.0 | 1 | 33.3 | 49.2 | | CCT | 0 | 0.0 | 6 | 37.5 | 37.3 |
| | TGT | 3 | 100.0 | 2 | 66.7 | 50.8 | SER (S) | AGC | 0 | 0.0 | 2 | 15.4 | 17.9 |
| END | TAA | 0 | 0.0 | 0 | 0.0 | 0.0 | | AGT | 4 | 30.8 | 2 | 15.4 | 15.8 |
| | TAG | 0 | 0.0 | 0 | 0.0 | 0.0 | | TCA | 3 | 23.1 | 3 | 23.1 | 20.4 |
| | TGA | 1 | 100.0 | 1 | 100.0 | 100.0 | | TCC | 3 | 23.1 | 2 | 15.4 | 18.7 |
| GLN (Q) | CAA | 5 | 45.5 | 5 | 45.5 | 50.0 | | TCG | 1 | 7.7 | 0 | 0.0 | 0.0 |
| | CAG | 6 | 54.5 | 6 | 54.5 | 50.0 | | TCT | 2 | 15.4 | 4 | 30.8 | 27.2 |
| GLU | GAA | 13 | 72.2 | 8 | 44.4 | 43.6 | THR (T) | ACA | 3 | 27.3 | 3 | 27.3 | 26.3 |
| (E) 16 | GAG | 5 | 27.8 | 10 | 55.6 | 56.4 | | ACC | 2 | 18.2 | 3 | 27.3 | 26.9 |
| GLY (G) | GGA | 0 | 0.0 | 5 | 35.7 | 36.4 | | ACG | 2 | 18.2 | 2 | 18.2 | 16.9 |
| | GGC | 5 | 35.7 | 2 | 14.3 | 16.2 | | ACT | 4 | 36.4 | 3 | 27.3 | 30.0 |
| | GGG | 2 | 14.3 | 2 | 14.3 | 15.2 | TRP (W) | TGG | 6 | 100 | 6 | 100 | 100.0 |
| | GGT | 7 | 50.0 | 5 | 35.7 | 32.1 | TYR (Y) | TAC | 2 | 22.2 | 5 | 55.6 | 59.4 |
| HIS (H) | CAC | 1 | 20.0 | 3 | 60.0 | 49.6 | | TAT | 7 | 77.8 | 4 | 44.4 | 40.6 |
| | CAT | 4 | 80.0 | 2 | 40.0 | 50.4 | VAL (V) | GTA | 0 | 0.0 | 0 | 0.0 | 0.0 |
| ILE (I) | ATA | 2 | 20.0 | 3 | 30.0 | 21.1 | | GTC | 1 | 12.5 | 2 | 25.0 | 27.0 |
| | ATC | 4 | 40.0 | 4 | 40.0 | 42.7 | | GTG | 3 | 37.5 | 3 | 37.5 | 31.7 |
| | ATT | 4 | 40.0 | 3 | 30.0 | 36.2 | | GTT | 4 | 50.0 | 3 | 37.5 | 41.3 |
| | Totals | 116 | | 116 | | | | Totals | 122 | | 122 | | |

[0255] After the codon optimization of the coding region sequences were completed, additional nucleotide sequences were added to the optimized coding region sequence. Restriction sites for the facilitation of cloning, a Kozak sequence and additional stop codons were added to the plant optimized coding sequence. In addition, a second series of PUFA synthase OrfA, PUFA synthase OrfB, PUFA synthase chimeric OrfC, acyl-CoA synthetase and phosphopantetheinyl transferase HetI coding sequences were designed, which contained a chloroplast targeting sequence from the Arabidopsis thaliana Ribulose Bisphosphate Carboxylase small chain 1A (GenBank ID: NM_{—}202369.2). This sequence, SEQ ID NO: 28, was added to the previously described coding sequences for PUFA synthase OrfA, PUFA synthase OrfB, PUFA synthase chimeric OrfC and phosphopantetheinyl transferase HetI. The initial Methionine from SEQ ID NO: 6, SEQ ID NO: 7, SEQ ID NO: 8 and SEQ ID NO: 10 was removed and replaced with the chloroplast targeting sequence. The sequences that contain the chloroplast targeting sequence are identified as version 4 (v4) throughout the specification.

[0256] A second chloroplast transit peptide was added to the PUFA synthase OrfA, PUFA synthase OrfB, PUFA synthase chimeric OrfC, acyl-CoA synthetase and phosphopantetheinyl transferase HetI coding sequences. These coding sequences were designed to contain a chloroplast targeting sequence from acyl-ACP-thioesterase (GenBank ID: X73849.1). This sequence, SEQ ID NO: 29, was added to the previously described coding sequences for PUFA synthase OrfA, PUFA synthase OrfB, PUFA synthase chimeric OrfC and phosphopantetheinyl transferase HetI. The initial Methionine from SEQ ID NO: 6, SEQ ID NO: 7, SEQ ID NO: 8 and SEQ ID NO: 10 was removed and replaced with the chloroplast targeting sequence. The sequences that contain the chloroplast targeting sequence are identified as version 5 (v5) throughout the specification.

[0257] An alternative version of the acyl-CoA synthetase gene from Schizochytrium sp. was created by modifying the native gene sequence to remove superfluous open reading frames. This version was labeled as “SzACS-2 v4” and listed as SEQ ID NO: 30. The resulting gene is used to replace the acyl-CoA synthetase expression gene sequence, described above as “SzACS-2 v3.”

[0258] Once a plant-optimized DNA sequence has been designed on paper or in silico, actual DNA molecules can be synthesized in the laboratory to correspond in sequence precisely to the designed sequence. Such synthetic DNA molecules can be cloned and otherwise manipulated exactly as if they were derived from natural or native sources. Synthesis of DNA fragments comprising SEQ ID NO: 6, SEQ ID NO: 7, SEQ ID NO: 8. SEQ ID NO: 9 and SEQ ID NO: 10 containing the additional sequences described above were performed by commercial suppliers (Geneart Ag, Regensburg, Germany). The synthetic DNA was then cloned into expression vectors and transformed into Agrobacterium and soybean as described in Examples 2 and 3.

### Example 2

### Plasmid Construction for pDAB7362

[0259] The pDAB7362 binary plasmid (FIG. 2; SEQ ID NO:11) was constructed using a multi-site Gateway L-R recombination reaction. pDAB7362 contains three PUFA synthase PTUs (which express the PUFA synthase OrfA, PUFA synthase OrfB, PUFA synthase chimeric OrfC genes described above), one acyl-CoA synthetase PTU, one phosphopantetheinyl transferase HetI PTU and a phosphinothricin acetyl transferase PTU. Specifically, the first PUFA synthase PTU contains a truncated Phaseolus vulgaris phytohemagglutinin-L gene promoter (PvDlec2 promoter v2; GenBank Accession Number X06336), Arabidopsis thaliana AT2S3 gene 5′ untranslated region (2S 5′ UTR; GenBank Accession Number NM_{—}118850), Schizochytrium sp. Polyunsaturated Fatty Acid synthase Open Reading Frame A (SzPUFA OrfA v3) and Arabidopsis thaliana 2S albumin gene 3′ untranslated region terminator (At2S SSP terminator v1; GenBank Accession Number M22035). The second PUFA synthase PTU contains the PvDlec2 promoter v2, 2S 5′ UTR, Schizochytrium sp. Polyunsaturated Fatty Acid synthase Open Reading Frame B (SzPUFA OrfB v3) and At2S SSP terminator v1. The third PUFA synthase PTU contains the PvDlec2 promoter v2, 2S 5′ UTR, Schizochytrium and Thraustochytrium sp. Polyunsaturated Fatty Acid synthase Open Reading Frame C (hSzThPUFA OrfC v3) and At2S SSP terminator v1. The acyl-CoA synthetase PTU contains the PvDlec2 promoter v2, 2S 5′ UTR, Schizochytrium sp. acyl-CoA synthetase (SzACS-2 v3) and At2S SSP terminator v1. The phosphopantetheinyl transferase PTU contains the PvDlec2 promoter v2, 2S 5′ UTR, Nostoc sp. 4′ phosphopantetheinyl transferase HetI (No HetI v3) and At2S SSP terminator v1.

[0260] Plasmids pDAB7334, pDAB7335, pDAB7336, pDAB7339 and pDAB7333 were recombined to form pDAB7362. Specifically, the five PTUs described above were placed in a head-to-tail orientation within the T-strand DNA border regions of the plant transformation binary pDAB7333. The order of the genes is: SzPUFA OrfA v3, SzPUFA OrfB v3, hSzThPUFA OrfC v3, SzACS-2 v3, NoHetI v3. pDAB7333 also contains the phosphinothricin acetyl transferase PTU: Cassava vein Mosaic Virus Promoter (CsVMV promoter v2; Verdaguer et al., Plant Molecular Biology 31:1129-1139; 1996), phosphinothricin acetyl transferase (PAT v5; Wohlleben et al., Gene 70:25-37; 1988) and Agrobacterium tumefaciens ORF1 3′ untranslated region (AtuORF1 3′ UTR v4; Huang et al., J. Bacteriol. 172:1814-1822; 1990), in addition to other regulatory elements such as Overdrive (Toro et al., PNAS 85(22): 8558-8562; 1988) and T-strand border sequences (T-DNA Border A and T-DNA Border B; Gardner et al., Science 231:725-727; 1986 and International Publication No. WO 2001/025459 A1). Recombinant plasmids containing the five PTUs were then isolated and tested for incorporation of the five PTUs with restriction enzyme digestion and DNA sequencing.

### Example 2.1

### Construction of Additional Plasmids that use the PvDlec2 Promoter to Drive Expression

[0261] Additional constructs were designed and built that use the PvDlec2 promoter to drive expression of the PUFA synthase OrfA, PUFA synthase OrfB, PUFA synthase chimeric OrfC, acyl-CoA synthetase, and 4′ phosphopantetheinyl transferase HetI transgenes. Various alterations to these constructs have been made to increase expression levels. These changes include the use of non-codon optimized gene sequences, incorporation of chloroplast transit peptides, and removal of the acyl-CoA synthetase PTU.

[0262] The newly constructed plasmids are used to stably transform soybean plants. Transgenic soybean plants are isolated and molecularly characterized. The use of these alternative constructs result in soybean plants that contain greater amounts of DHA and LC-PUFAs. The resulting LC-PUFA accumulation is determined and soybean plants that produce 0.01% to 15% DHA or 0.01% to 15% LC-PUFA are identified.

### Example 2.2

### Construction of pDAB7361

[0263] pDAB7361 is a binary plasmid that was constructed to contain a native, non-codon optimized version of SzPUFA OrfA v2, the remaining gene sequences are codon optimized (SzPUFA OrfB v3, hSzThPUFA OrfC v3, SzACS-2 v3, and NoHetI v3). The pDAB7361 plasmid (FIG. 3; SEQ ID NO:31) was constructed using a multi-site Gateway L-R recombination reaction. pDAB7361 contains three PUFA synthase PTUs, one acyl-CoA synthetase PTU, one phosphopantetheinyl transferase PTU and a phosphinothricin acetyl transferase PTU. Specifically, the first PUFA synthase PTU contains the PvDlec2 promoter v2, 2S 5′ UTR, SzPUFA OrfA v2 and At2S SSP terminator v1. The second PUFA synthase PTU contains the PvDlec2 promoter v2, 2S 5′ UTR, SzPUFA OrfB v3 and At2S SSP terminator v1. The third PUFA synthase PTU contains the PvDlec2 promoter v2, 2S 5′ UTR, hSzThPUFA OrfC v3 and At2S SSP terminator v1. The acyl-CoA synthetase PTU contains the PvDlec2 promoter v2, 2S 5′ UTR, SzACS-2 v3 gene and At2S SSP terminator v1. The phosphopantetheinyl transferase PTU contains the PvDlec2 promoter v2, 2S 5′ UTR, NoHetI v3 and At2S SSP terminator v1.

[0264] Plasmids pDAB7355, pDAB7335, pDAB7336, pDAB7339 and pDAB7333 were recombined to form pDAB7361. Specifically, the five PTUs described above were placed in a head-to-tail orientation within the T-strand DNA border regions of the plant transformation binary pDAB7333. The order of the genes is: SzPUFA OrfA v2, SzPUFA OrfB v3, hSzThPUFA OrfC v3, SzACS-2 v3 NoHetI v3. pDAB7333 also contains the phosphinothricin acetyl transferase PTU: CsVMV promoter v2, PAT v5, AtuORF1 3′ UTR v4 in addition to other regulatory elements such as Overdrive and T-strand border sequences (T-DNA Border A and T-DNA Border B). Recombinant plasmids containing the six PTUs were then isolated and tested for incorporation of the six PTUs with restriction enzyme digestion and DNA sequencing.

### Example 2.3

### Construction of DAB7363

[0265] pDAB7363 is a binary plasmid that was constructed to contain rebuilt, codon optimized versions of SzPUFA OrfA v4, SzPUFA OrfB v4, hSzThPUFA OrfC v4, and NoHetI v4 all of which contain the Ribulose Bisphosphate Carboxylase small chain 1A (labeled as SSU-TP v1) that is fused to the amino terminus of the coding sequence. In addition this plasmid contains a rebuilt, codon optimized version of SzACS-2 v3. The pDAB7363 plasmid (FIG. 4; SEQ ID NO:32) was constructed using a multi-site Gateway L-R recombination reaction. pDAB7363 contains three PUFA synthase PTUs, one acyl-CoA synthetase PTU, one phosphopantetheinyl transferase PTU and a phosphinothricin acetyl transferase PTU. Specifically, the first PUFA synthase PTU contains the PvDlec2 promoter v2, 2S 5′ UTR, SzPUFA OrfA v4 and At2S SSP terminator v1. The second PUFA synthase PTU contains the PvDlec2 promoter v2, 2S 5′ UTR, SzPUFA OrfB v4 and At2S SSP terminator v1. The third PUFA synthase PTU contains the PvDlec2 promoter v2, 2S 5′ UTR, hSzThPUFA OrfC v4 and At2S SSP terminator v1. The acyl-CoA synthetase PTU contains the PvDlec2 promoter v2, 2S 5′ UTR, SzACS-2 v3 gene and At2S SSP terminator v1. The phosphopantetheinyl transferase PTU contains the PvDlec2 promoter v2, 2S 5′ UTR, NoHetI v4 and At2S SSP terminator v1.

[0266] Plasmids pDAB7340, pDAB7341, pDAB7342, pDAB7344 and pDAB7333 were recombined to form pDAB7363. Specifically, the five PTUs described above were placed in a head-to-tail orientation within the T-strand DNA border regions of the plant transformation binary pDAB7333. The order of the genes is: SzPUFA OrfA v4, SzPUFA OrfB v4, hSzThPUFA OrfC v4, SzACS-2 v3, NoHetI v4. pDAB7333 also contains the phosphinothricin acetyl transferase PTU: CsVMV promoter v2, PAT v5, AtuORF1 3′ UTR v4 in addition to other regulatory elements such as Overdrive and T-strand border sequences (T-DNA Border A and T-DNA Border B). Recombinant plasmids containing the six PTUs were then isolated and tested for incorporation of the six PTUs with restriction enzyme digestion and DNA sequencing.

### Example 2.4

### Construction of pDAB7365

[0267] pDAB7365 is a binary plasmid that was constructed to contain native, non-codon optimized versions of SzPUFA OrfA v2, SzPUFA OrfB v2, hSzThPUFA OrfC v2, SzACS-2 v2, and NoHetI v2. The pDAB7365 plasmid (FIG. 5; SEQ ID NO:33) was constructed using a multi-site Gateway L-R recombination reaction. pDAB7365 contains three PUFA synthase PTUs, one acyl-CoA synthetase PTU, one phosphopantetheinyl transferase PTU and a phosphinothricin acetyl transferase PTU. Specifically, the first PUFA synthase PTU contains the PvDlec2 promoter v2, 2S 5′ UTR, SzPUFA OrfA v2 and At2S SSP terminator v1. The second PUFA synthase PTU contains the PvDlec2 promoter v2, 2S 5′ UTR, SzPUFA OrfB v2 and At2S SSP terminator v1. The third PUFA synthase PTU contains the PvDlec2 promoter v2, 2S 5′ UTR, SzPUFA OrfC v2 and At2S SSP terminator v1. The acyl-CoA synthetase PTU contains the PvDlec2 promoter v2, 2S 5′ UTR, SzACS-2 v2 gene and At2S SSP terminator v1. The phosphopantetheinyl transferase PTU contains the PvDlec2 promoter v2, 2S 5′ UTR, NoHetI v2 and At2S SSP terminator v1.

[0268] Plasmids pDAB7355, pDAB7356, pDAB7357, pDAB7360 and pDAB7333 were recombined to form pDAB7365. Specifically, the five PTUs described above were placed in a head-to-tail orientation within the T-strand DNA border regions of the plant transformation binary pDAB7333. The order of the genes is: SzPUFA OrfA v2, SzPUFA OrfB v2, SzPUFA OrfC v2, SzACS-2 v2, NoHetI v2. pDAB7333 also contains the phosphinothricin acetyl transferase PTU: CsVMV promoter v2, PAT v5, AtuORF1 3′ UTR v4 in addition to other regulatory elements such as Overdrive and T-strand border sequences (T-DNA Border A and T-DNA Border B). Recombinant plasmids containing the five PTUs were then isolated and tested for incorporation of the six PTUs with restriction enzyme digestion and DNA sequencing.

### Example 2.5

### Construction of pDAB7368

[0269] pDAB7368 is a binary plasmid that was constructed to contain native, non-codon optimized versions of SzPUFA OrfA v2, SzPUFA OrfB v2, hSzThPUFA OrfC v2, and NoHetI v2. This construct does not contain the SzACS-2 coding sequence. The pDAB7368 plasmid (FIG. 6; SEQ ID NO:34) was constructed using a multi-site Gateway L-R recombination reaction. pDAB7368 contains three PUFA synthase PTUs, one acyl-CoA synthetase PTU, one phosphopantetheinyl transferase PTU and a phosphinothricin acetyl transferase PTU. Specifically, the first PUFA synthase PTU contains the PvDlec2 promoter v2, 2S 5′ UTR, SzPUFA OrfA v2 and At2S SSP terminator v1. The second PUFA synthase PTU contains the PvDlec2 promoter v2, 2S 5′ UTR, SzPUFA OrfB v2 and At2S SSP terminator v1. The third PUFA synthase PTU contains the PvDlec2 promoter v2, 2S 5′ UTR, SzPUFA OrfC v2 and At2S SSP terminator v1. The phosphopantetheinyl transferase PTU contains the PvDlec2 promoter v2, 2S 5′ UTR, NoHetI v2 and At2S SSP terminator v1.

[0270] Plasmids pDAB7355, pDAB7356, pDAB7357, pDAB7359 and pDAB7333 were recombined to form pDAB7368. Specifically, the four PTUs described above were placed in a head-to-tail orientation within the T-strand DNA border regions of the plant transformation binary pDAB7333. The order of the genes is: SzPUFA OrfA v2, SzPUFA OrfB v2, SzPUFA OrfC v2, NoHetI v2. pDAB7333 also contains the phosphinothricin acetyl transferase PTU: CsVMV promoter v2, PAT v5, AtuORF1 3′ UTR v4 in addition to other regulatory elements such as Overdrive and T-strand border sequences (T-DNA Border A and T-DNA Border B). Recombinant plasmids containing the five PTUs were then isolated and tested for incorporation of the five PTUs with restriction enzyme digestion and DNA sequencing.

### Example 2.6

### Construction of pDAB7369

[0271] pDAB7369 is a binary plasmid that was constructed to contain rebuilt, codon optimized versions of SzPUFA OrfA v3, SzPUFA OrfB v3, hSzThPUFA OrfC v3, and NoHetI v3 this construct does not contain the SzACS-2 coding sequence PTU. The pDAB7369 plasmid (FIG. 7; SEQ ID NO:35) was constructed using a multi-site Gateway L-R recombination reaction. pDAB7369 contains three PUFA synthase PTUs, one acyl-CoA synthetase PTU, one phosphopantetheinyl transferase PTU and a phosphinothricin acetyl transferase PTU. Specifically, the first PUFA synthase PTU contains the PvDlec2 promoter v2, 2S 5′ UTR, SzPUFA OrfA v3 and At2S SSP terminator v1. The second PUFA synthase PTU contains the PvDlec2 promoter v2, 2S 5′ UTR, SzPUFA OrfB v3 and At2S SSP terminator v1. The third PUFA synthase PTU contains the PvDlec2 promoter v2, 2S 5′ UTR, hSzThPUFA OrfC v3 and At2S SSP terminator v1. The phosphopantetheinyl transferase PTU contains the PvDlec2 promoter v2, 2S 5′ UTR, NoHetI v3 and At2S SSP terminator v1.

[0272] Plasmids pDAB7334, pDAB7335, pDAB7336, pDAB7338 and pDAB7333 were recombined to form pDAB7369. Specifically, the four PTUs described above were placed in a head-to-tail orientation within the T-strand DNA border regions of the plant transformation binary pDAB7333. The order of the genes is: SzPUFA OrfA v3, SzPUFA OrfB v3, hSzThPUFA OrfC v3, NoHetI v3. pDAB7333 also contains the phosphinothricin acetyl transferase PTU: CsVMV promoter v2, PAT v5, AtuORF1 3′ UTR v4 in addition to other regulatory elements such as Overdrive and T-strand border sequences (T-DNA Border A and T-DNA Border B). Recombinant plasmids containing the five PTUs were then isolated and tested for incorporation of the five PTUs with restriction enzyme digestion and DNA sequencing.

### Example 2.7

### Construction of pDAB7370

[0273] pDAB7370 is a binary plasmid that was constructed to contain rebuilt, codon optimized versions of SzPUFA OrfA v4, SzPUFA OrfB v4, hSzThPUFA OrfC v4, and NoHetI v4 that contain the Ribulose Bisphosphate Carboxylase small chain 1A (labeled as SSU-TP v1), which is fused to the amino terminus of the coding sequence. This construct does not contain the SzACS-2 coding sequence PTU. The pDAB7370 plasmid (FIG. 8; SEQ ID NO: 36) was constructed using a multi-site Gateway L-R recombination reaction. pDAB7370 contains three PUFA synthase PTUs, one acyl-CoA synthetase PTU, one phosphopantetheinyl transferase PTU and a phosphinothricin acetyl transferase PTU. Specifically, the first PUFA synthase PTU contains the PvDlec2 promoter v2, 2S 5′ UTR, SzPUFA OrfA v4 and At2S SSP terminator v1. The second PUFA synthase PTU contains the PvDlec2 promoter v2, 2S 5′ UTR, SzPUFA OrfB v4 and At2S SSP terminator v1. The third PUFA synthase PTU contains the PvDlec2 promoter v2, 2S 5′ UTR, hSzThPUFA OrfC v4 and At2S SSP terminator v1. The phosphopantetheinyl transferase PTU contains the PvDlec2 promoter v2, 2S 5′ UTR, NoHetI v4 and At2S SSP terminator v1.

[0274] Plasmids pDAB7340, pDAB7341, pDAB7342, pDAB7343 and pDAB7333 were recombined to form pDAB7370. Specifically, the four PTUs described above were placed in a head-to-tail orientation within the T-strand DNA border regions of the plant transformation binary pDAB7333. The order of the genes is: SzPUFA OrfA v4, SzPUFA OrfB v4, hSzThPUFA OrfC v4, NoHetI v4. pDAB7333 also contains the phosphinothricin acetyl transferase PTU: CsVMV promoter v2, PAT v5, AtuORF1 3′ UTR v4 in addition to other regulatory elements such as Overdrive and T-strand border sequences (T-DNA Border A and T-DNA Border B). Recombinant plasmids containing the five PTUs were then isolated and tested for incorporation of the five PTUs with restriction enzyme digestion and DNA sequencing.

### Example 2.8

### Construction of pDAB100518

[0275] pDAB100518 is a binary plasmid that was constructed to contain rebuilt, codon optimized versions of SzPUFA OrfA v5, SzPUFA OrfB v5, hSzThPUFA OrfC v5, and NoHetI v5 that contain the chloroplast transit peptide from acyl-ACP-thioesterase (labeled as Thioesterase Transit Peptide), which is fused to the amino terminus of the coding sequence. In addition, the plasmid contains a SzACS-2 v3 coding sequence PTU, which does not possess a chloroplast transit peptide. The pDAB100518 plasmid (FIG. 9; SEQ ID NO:37) was constructed using a multi-site Gateway L-R recombination reaction. pDAB100518 contains three PUFA synthase PTUs, one acyl-CoA synthetase PTU, one phosphopantetheinyl transferase PTU and a phosphinothricin acetyl transferase PTU. Specifically, the first PUFA synthase PTU contains the PvDlec2 promoter v2, 2S 5′ UTR, SzPUFA OrfA v5 and At2S SSP terminator v1. The second PUFA synthase PTU contains the PvDlec2 promoter v2, 2S 5′ UTR, SzPUFA OrfB v5 and At2S SSP terminator v1. The third PUFA synthase PTU contains the PvDlec2 promoter v2, 2S 5′ UTR, hSzThPUFA OrfC v5 and At2S SSP terminator v1. The acyl-CoA synthetase PTU contains the PvDlec2 promoter v2, 2S 5′ UTR, SzACS-2 v3 gene and At2S SSP terminator v1. The phosphopantetheinyl transferase PTU contains the PvDlec2 promoter v2, 2S 5′ UTR, NoHetI v5 and At2S SSP terminator v1.

[0276] Plasmids pDAB100517, pDAB100514, pDAB100511, pDAB100515 and pDAB7333 were recombined to form pDAB100518. Specifically, the five PTUs described above were placed in a head-to-tail orientation within the T-strand DNA border regions of the plant transformation binary pDAB7333. The order of the genes is: SzPUFA OrfA v5, SzPUFA OrfB v5, hSzThPUFA OrfC v5, SzACS-2 v3, NoHetI v5. pDAB7333 also contains the phosphinothricin acetyl transferase PTU: CsVMV promoter v2, PAT v5, AtuORF1 3′ UTR v4 in addition to other regulatory elements such as Overdrive and T-strand border sequences (T-DNA Border A and T-DNA Border B). Recombinant plasmids containing the six PTUs were then isolated and tested for incorporation of the six PTUs with restriction enzyme digestion and DNA sequencing.

### Example 2.9

### Construction of pDAB101476

[0277] pDAB101476 is a binary plasmid that was constructed to contain rebuilt, codon optimized versions of SzPUFA OrfA v3, SzPUFA OrfB v3, hSzThPUFA OrfC v3, and NoHetI v3. The SzACS-2 v2 gene sequence is the native, non-codon optimized version. The pDAB101476 plasmid (FIG. 10; SEQ ID NO: 38) was constructed using a multi-site Gateway L-R recombination reaction. pDAB101476 contains three PUFA synthase PTUs, one acyl-CoA synthetase PTU, one phosphopantetheinyl transferase PTU and a phosphinothricin acetyl transferase PTU. Specifically, the first PUFA synthase PTU contains the PvDlec2 promoter v2, 2S 5′ UTR, SzPUFA OrfA v3 and At2S SSP terminator v1. The second PUFA synthase PTU contains the PvDlec2 promoter v2, 2S 5′ UTR, SzPUFA OrfB v3 and At2S SSP terminator v1. The third PUFA synthase PTU contains the PvDlec2 promoter v2, 2S 5′ UTR, hSzThPUFA OrfC v3 and At2S SSP terminator v1. The acyl-CoA synthetase PTU contains the PvDlec2 promoter v2, 2S 5′ UTR, SzACS-2 v2 gene and At2S SSP terminator v1. The phosphopantetheinyl transferase PTU contains the PvDlec2 promoter v2, 2S 5′ UTR, NoHetI v3 and At2S SSP terminator v1.

[0278] Plasmids pDAB7334, pDAB7335, pDAB7336, pDAB101471 and pDAB7333 were recombined to form pDAB101476. Specifically, the five PTUs described above were placed in a head-to-tail orientation within the T-strand DNA border regions of the plant transformation binary pDAB7333. The order of the genes is: SzPUFA OrfA v3, SzPUFA OrfB v3, hSzThPUFA OrfC v3, SzACS-2 v2, NoHetI v3. pDAB7333 also contains the phosphinothricin acetyl transferase PTU: CsVMV promoter v2, PAT v5. AtuORF1 3′ UTR v4 in addition to other regulatory elements such as Overdrive and T-strand border sequences (T-DNA Border A and T-DNA Border B). Recombinant plasmids containing the six PTUs were then isolated and tested for incorporation of the six PTUs with restriction enzyme digestion and DNA sequencing.

### Example 2.10

### Construction of pDAB101477

[0279] pDAB101477 is a binary plasmid that was constructed to contain rebuilt, codon optimized versions of SzPUFA OrfA v3, SzPUFA OrfB v3, hSzThPUFA OrfC v3, and NoHetI v3. The pDAB101477 plasmid (FIG. 11; SEQ ID NO:39) was constructed using a multi-site Gateway L-R recombination reaction. pDAB101477 contains three PUFA synthase PTUs, one acyl-CoA synthetase PTU, one phosphopantetheinyl transferase PTU and a phosphinothricin acetyl transferase PTU. Specifically, the first PUFA synthase PTU contains the PvDlec2 promoter v2, 2S 5′ UTR, SzPUFA OrfA v3 and At2S SSP terminator v1. The second PUFA synthase PTU contains the PvDlec2 promoter v2, 2S 5′ UTR, SzPUFA OrfB v3 and At2S SSP terminator v1. The third PUFA synthase PTU contains the PvDlec2 promoter v2, 2S 5′ UTR, hSzThPUFA OrfC v3 and At2S SSP terminator v1. The acyl-CoA synthetase PTU contains the PvDlec2 promoter v2, 2S 5′ UTR, SzACS-2 v4 gene and At2S SSP terminator v1. The phosphopantetheinyl transferase PTU contains the PvDlec2 promoter v2, 2S 5′ UTR, NoHetI v3 and At2S SSP terminator v1.

[0280] Plasmids pDAB7334, pDAB7335, pDAB7336, pDAB101472 and pDAB7333 were recombined to form pDAB101477. Specifically, the five PTUs described above were placed in a head-to-tail orientation within the T-strand DNA border regions of the plant transformation binary pDAB7333. The order of the genes is: SzPUFA OrfA v3, SzPUFA OrfB v3, hSzThPUFA OrfC v3, SzACS-2 v4, NoHetI v3. pDAB7333 also contains the phosphinothricin acetyl transferase PTU: CsVMV promoter v2, PAT v5, AtuORF1 3′ UTR v4 in addition to other regulatory elements such as Overdrive and T-strand border sequences (T-DNA Border A and T-DNA Border B). Recombinant plasmids containing the six PTUs were then isolated and tested for incorporation of the six PTUs with restriction enzyme digestion and DNA sequencing.

### Example 3

### Soybean Transformation

[0281] Transgenic soybean (Glycine max) was generated through Agrobacterium-mediated transformation of soybean cotyledonary node explants. The disarmed Agrobacterium strain DA2552 (U.S. Appl. No. 61/368,965, filed Jul. 29, 2010) carrying the binary vectors described above as pDAB7362 was used to initiate transformation.

[0282] Agrobacterium-mediated transformation was carried out using a modified ½ cotyledonary node procedure of Zeng et al. (Zeng P., Vadnais D. A., Zhang Z., Polacco J. C., (2004), Plant Cell Rep., 22(7): 478-482). Briefly, soybean seeds (cv. Maverick) were germinated on basal media and cotyledonary nodes were isolated and infected with Agrobacterium. Shoot initiation, shoot elongation, and rooting media were supplemented with cefotaxime, timentin and vancomycin for removal of Agrobacterium. Glufosinate selection was employed to inhibit the growth of non-transformed shoots. Selected shoots were transferred to rooting medium for root development and then transferred to soil mix for acclimatization of plantlets.

[0283] Terminal leaflets of selected plantlets were treated topically (leaf paint technique) with glufosinate to screen for putative transformants. The screened plantlets were transferred to the greenhouse, allowed to acclimate and then leaf-painted with glufosinate to reconfirm tolerance. These putative transformed T₀ plants were sampled and molecular analyses was used to confirm the presence of PAT, and the PUFA synthase OrfA, PUFA synthase OrfB, PUFA synthase chimeric OrfC, acyl-CoA synthetase and 4′ phosphopantetheinyl transferase HetI transgenes. To plants were allowed to self-fertilize in the greenhouse to produce T₁ seed.

[0284] A second soybean transformation method was used to produce additional transgenic soybean plants. The disarmed Agrobacterium strain DA2552 (U.S. Provisional Patent App. No. 61/368,965) carrying the binary vector described above as pDAB7362 was used to initiate transformation.

[0285] Agrobacterium-mediated transformation was carried out using a modified half-seed procedure of Paz et al., (M. Paz, J. Martinez, A. Kalvig, T. Fonger, and K. Wang (2005) Plant Cell Rep., 25: 206-213). Briefly, mature soybean seeds were sterilized overnight with chlorine gas, and imbibed with sterile H₂O twenty hours before Agrobacterium-mediated plant transformation. Seeds were cut in half by a longitudinal cut along the hilum to separate the seed and remove the seed coat. The embryonic axis was excised and any axial shoots/buds were removed from the cotyledonary node. The resulting half seed explants were infected with Agrobacterium. Shoot initiation, shoot elongation, and rooting media were supplemented with cefotaxime, timentin and vancomycin for removal of Agrobacterium. Glufosinate selection was employed to inhibit the growth of non-transformed shoots. Selected shoots were transferred to rooting medium for root development and then transferred to soil mix for acclimatization of plantlets.

[0286] Terminal leaflets of selected plantlets were treated topically (leaf paint technique) with glufosinate to screen for putative transformants. The screened plantlets were transferred to the greenhouse, allowed to acclimate and then leaf-painted with glufosinate to reconfirm tolerance. These putative transformed T₀ plants were sampled and molecular analyses was used to confirm the presence of PAT, and the PUFA synthase OrfA, PUFA synthase OrfB, PUFA synthase chimeric OrfC, acyl-CoA synthetase and 4′ phosphopantetheinyl transferase HetI transgenes. Seven events were identified as containing the transgenes from pDAB7362. These T₀ plants were advanced for further analysis and allowed to self-fertilize in the greenhouse to give rise to T₁ seed.

### Example 4

### Molecular Analysis of Soybean Events

[0287] Transgene copy numbers of selected pDAB7362 soybean events were quantified using a comparative quantitative real time PCR (qPCR) method. Leaf tissue samples were taken from the top and bottom leaves of a mature soybean plant, these samples were combined and the genomic DNA was isolated. Genomic DNA was isolated using the BioSprint 96 DNA Plant Kit and a BioSprint 96 magnetic particle automation platform (Qiagen, Valencia, Calif.) per manufacturer's instructions. Extracted genomic DNA was diluted 1:5 with ddH20 for use as template in quantitative real time PCR reactions (qPCR).

[0288] qPCR Assays were designed to detect the SzPUFA OrfA v3, SzPUFA OrfB v3, hThSzPUFA OrfCv3, SzACS-2 v3, NoHetI v3, and PAT v5 transgenes in pDAB7362 soybean plants by using the Roche Assay Design Center (www.universalprobelibrary.com). The primers and probes used in the assays are described in Table 8. The presences of the target genes were detected with fluorescein-amidite (FAM) labeled UPL probes (Roche Diagnostics, Indianapolis, Ind.). These assays were executed in duplex reactions with a soybean internal reference GMFL01-25-J19, GenBank: AK286292.1 (referenced as GMS 116 in Table 8), which was labeled with the Cyanine-5 (Cy-5) fluorescent dye.

TABLE 8
qPCR assay primers and probes

| Target | Forward primer | Reverse Primer | Probe |
|---|---|---|---|
| SzPUFA | SEQ ID NO: 12 | SEQ ID NO: 13 | UPL #18 |
| OrfA v3 | cacaaccggtgtt | Gagcttcacaaag | |
| | gatgatg | gctctgc | |
| SzPUFA | SEQ ID NO: 14 | SEQ ID NO: 15 | UPL #97 |
| OrfB v3 | gaatccttgcgtc | Caatggactcacg | |
| | atttggt | cacaact | |
| hThSz- | SEQ ID NO: 16 | SEQ ID NO: 17 | UPL #26 |
| PUFA | ggattacctcaac | Tgtccatgcgcat | |
| OrfCv3 | attgctcct | atcctt | |
| SzACS2 | SEQ ID NO: 18 | SEQ ID NO: 19 | UPL #54 |
| v3 | agaaattgatggc | Ctgccgtgctgag | |
| | tgttggtg | tttctt | |
| NoHetI | SEQ ID NO: 20 | SEQ ID NO: 21 | UPL #3 |
| v3 | ccagaacacagaa | Tcccaagtatcca | |
| | ggcgttt | cccaagat | |
| PAT v5 | SEQ ID NO: 22 | SEQ ID NO: 23 | SEQ ID NO: 24 |
| | acaagagtggatt | Ctttgatgcctat | ccagcgtaagcaa |
| | gatgatctagaga | gtgacacgtaaac | taccagccacaac |
| | ggt | agt | acc |
| GMS116 | SEQ ID NO: 25 | SEQ ID NO: 26 | SEQ ID NO: 27 |
| | gtaatatgggctc | atggagaagaaca | ccatggcccggta |
| | agaggaatggt | ttggaattgc | ccatctggtc |

[0289] Real-time PCR reactions were run on a LC480II real-time PCR thermal cycler (Roche, Indianapolis, Ind.) using standard protocols. Data for the SzPUFA OrfA v3, SzPUFA OrfB v3, hThSzPUFA OrfCv3, SzACS-2 v3, NoHetI v3, and PAT v5, FAM-labeled assays were collected using a 533 nm emission filter and a 483 nm excitation signal. Data for the GMS1.16 Cy5-labeled reference assay was collected using a 660 nm filter and a 618 nm excitation signal. Crossing point values (Cp values) and target to reference ratios were calculated automatically using the LC480II software's “Advanced Relative Quantification” analysis workflow. A target-to-reference ratio for each sample was calculated using the standard “delta-delta-Ct” method. Estimated copy number was determined by normalizing sample target-reference ratios with the target-reference ratio of the soybean internal reference GMFL01-25-J19.

[0290] The estimated copy number of the PAT v5 selectable marker and docosahexaenoic acid (DHA) transgenes (SzPUFA OrfA v3, SzPUFA OrfB v3, hThSzPUFA OrfC v3, SzACS-2 v3, and NoHetI v3) was determined in T₁ plants from the seven pDAB7362 events. Plants from two events, 7362[710]-71006 and 7362[710]-71010, did not contain either the PAT v5 selectable marker or the DHA gene target sequences. Plants from the remaining events; 7362[710]-70903, 7362[710]-71005, 7362[710]-71008, and 7362[710]-71009, contained the PAT v5 selectable marker and the five DHA transgenes with copy numbers ranging from 1-10. Event 7362[708]-70801 produced T1 plants with 0, 1 or 2 copies of the PAT v5 gene indicating a single segregating locus and event 7362 [710]-71005 produced T1 plants with PAT v5 copy numbers between 0 and 4 suggesting segregation of two unlinked loci.

### Example 5

### Lipid Analysis of T₁ Cotyledons of Transgenic Soybean Plants

[0291] To avoid destructive analysis of limited quantities of T₁ seeds, fatty acid methyl ester (FAMEs) analysis was performed on post-germination green cotyledons of T₁ plants. Methods for the purification and analysis of FAMEs have been described (e.g., Z. D. Nightingale et al. (1999), Purification of fatty acid methyl esters by high-performance liquid chromatography, J. Chromatogr. B. Biomed. Sci. Appl. 732(2):495-500; and “Gas chromatography and lipids: a practical guide” by W. W Christie, 1989, The Oily Press). Characterization of the oil profile in the T₁ cotyledons is indicative of the oil profile in dry T₁ seed (R. F. Wilson and P. Kwanyuen (1986), Triacylglycerol synthesis and metabolism in germinating soybean cotyledons, Biochimica et Biophysica Acta (BBA)—Lipids and Lipid Metabolism, 877(2):231-237).

### Example 5.1

### Validation of Post-Germination Detection of DHA in T₁ Cotyledons Via Analysis of Transgenic Canola

[0292] Validation and detection of Long Chain Poly Unsaturated Fatty Acids (LC-PUFA) in post-germination green cotyledons was performed with DHA-producing canola seed to assess if characterization of the oil profile in the T₁ cotyledons is indicative of the presence of an oil profile within the mature T₁ seed. Transgenic canola seed harboring the binary plasmid, pDAB7362, were germinated at room temperature on water-saturated paper towels, and harvested after 3 days at which point the tissue was lyophilized. The tissue was directly transmethylated and not pre-extracted with hexane. The LC-PUFA content (% FAMEs by weight) was calculated and compared to the mature seed. The average DHA content from the 30 canola emerged cotyledons was 0.71% (total LC-PUFA=0.97%) with an oil content of 53.0%. The average DHA content of 48 mature canola seed prior to germination was 0.49% (total LC-PUFA=0.73%) with an oil content of 44.3%. This study demonstrates that LC-PUFAs can be detected post-germination in emerged green cotyledons and that detection of the LC-PUFAs in emerged green cotyledons indicates that LC-PUFA is present in the seed.

### Example 5.2

### Post-Germination Detection of DHA in T₁ Soybean Cotyledons

[0293] FAME analysis was performed on one excised green cotyledon per soybean seedling sampled 3 to 5 days after planting. The plant material was lyophilized, homogenized using a steel ball and ball mill and defatted 3 times with hexane. The pooled hexane fraction was evaporated and the dry residue was weighed and reconstituted in heptane. A known amount of oil residue was transmethylated with 0.25 M of freshly prepared sodium methoxide (Sigma-Aldrich, St. Louis, Mo.) in methanol in the presence of the surrogate, triheptadecanoin (Nu-Chek Prep, Elysian, Minn.). The reaction was conducted under mild heat (40° C.) and constant shaking and the resulting FAMEs extracted with heptane. Completion of the reaction was verified by recovery of the reacted heptadecanoate methyl-ester surrogate. The FAMEs extracts were analyzed by GC-FID using an Agilent 6890 Gas Chromatograph (Agilent Technologies, Santa Clara, Calif.) and a 15 m×0.25 mm×0.25 μm BPX 70 capillary column from SGE (Austin, Tex.). Each FAME peak was identified by its retention time and quantified by the injection of a rapeseed oil reference mix from Matreya LLC (Pleasant Gap, Pa.). The calibration standard contained individually added standards of DHA, EPA and DPA(n-6) methyl esters from Nu-Chek. Data analysis was performed using ChemStation4 software (Agilent). T₁ cotyledons from two events contained DHA; pDAB7362[708]-70801.001 and pDAB7362[710]-71005.001 (Table 9).

[0294] Forty seeds from Event pDAB7362[708]-70801.001 were germinated and screened for the presence of LC-PUFA in excised green cotyledon. Cotyledons from six of the forty seeds contained LC-PUFA in a range of 0.78% to 1.58% (with a mean of 1.12%). DHA content ranged from 0.48% to 0.93% (with a mean of 0.68%), and DP A (n-6) content ranged from 0.3% to 0.65% (with a mean of 0.44%).

[0295] Thirty-nine seeds from Event pDAB7362[710]-71005.001 were germinated and screened for the presence of LC-PUFA in excised green cotyledon. Cotyledons from thirty-seven of the thirty-nine seeds contained LC-PUFA in a range of 0.70% to 1 1.98% (with a mean of 3.91%). Of the total LC-PUFA, DHA content ranged from 0.36% to 8.00% (with a mean of 2.24%), and DPA(n-6) content ranged from 0.34% to 3.98% (with a mean of 1.68%).

[0296] Identification of LC-PUFA was confirmed by evaluating specific fragmentation of standard PUFA methyl esters (Nu-Chek Prep, Elysian, Minn.) using a Pegasus III GC-TOF-MS (Leco, St. Joseph, Mich.) compared to a negative control.

TABLE 9
LC-PUFA content by weight percentage of total fatty acids from
germinated T₁ soybean seed cotyledons

| | | # of DHA | | | | | | |
|---|---|---|---|---|---|---|---|---|
| | # of total | positive | DHA | | DPA(n-6) | | Total PUFA | |
| Event ID | seedlings | seedlings | Mean | Range | Mean | Range | Mean | Range |
| pDAB7362[708]-70801.001 | 40 | 6 | 0.68% | 0.48-0.93% | 0.44% | 0.3-0.65% | 1.12% | 0.78-1.58% |
| pDAB7362[710]-71005.001 | 39 | 37 | 2.24% | 0.36-8.00% | 1.68% | 0.34-3.98% | 3.91% | 0.70-11.98% |
| Williams 82 control | 15 | 0 | 0% | — | 0% | — | 0% | — |

### Example 6

### Lipid Analysis of Mature T₂ Seed from Transgenic Soybean Events

[0297] T₁ plants from two events, 7362[708]-70801.001 and 7362[710]-71005.001, were grown to maturity in the greenhouse. Plants were selected that contained high levels of LC-PUFAs in the T₁ cotyledon and one or two copies of PAT v5 and the accompanying five genes for DHA production. These plants were self-fertilized and the resulting T₂ seed harvested at maturity. Single seeds were analyzed via FAMEs GC-FID to determine the LC-PUFA and DHA content in the T₂ soybean seed. Twelve whole mature seeds per plant were individually analyzed by crushing the seed with a press and homogenization using a steel ball and ball mill. The tissue was defatted three times with hexane, the pooled hexane fractions were evaporated to dryness and the residue weighed and reconstituted in heptane for FAME analysis performed as described in the previous example.

[0298] Single T₂ seeds from a T₁ plant of event 7362[708]-70801.001 (described as 7362[708]-70801.Sx.021 in FIG. 12) that possessed a single copy of PAT v5 contained 0% to 0.73% DHA (0% to 1.19% total LC-PUFA). Single T₂ seeds from two T₁ plants of event 7362[710]-71005.001 (described as 7362[710]-71005.Sx.006 and 7362[710]-71005.Sx.0.35 in FIG. 12) possessing a single copy of PAT v5 contained 0% to 2.08% DHA (0% to 3.56% total LC-PUFA). Single T₂ seeds from seven T₁ plants of event 7362[710]-71005.001 (described as 7362[710]-71005.Sx.010, 7362[710]-71005.Sx.012, 7362[710]-71005.Sx.013, 7362[710]-71005.Sx.016, 7362[710]-71005.Sx.018, 7362[710]-71005.Sx.025, and 7362[710]-71005 Sx.031 in FIG. 12) containing two copies of PAT v5 contained 0% to 2.84% DHA (0% to 4.77% total LC-PUFA). The mean DHA content of T₂ seeds from the highest DHA-producing line (7362[710]-71005.Sx.025) was 1.83% (3.11% total LC-PUFA). The DHA content of each T₂ seed from the individual T₁ plants is shown in FIG. 12.

[0299] DHA comprised 60% of the total LC-PUFA content in those T₂ seeds that contained LC-PUFA. Only the two novel LC-PUFAs, DHA and DPA(n-6), were detected in the T₂ soybean seeds. The fatty acids that are expected to be found in soybean seeds were detected at normal levels, except that total CI 8 fatty acids were proportionally lower due to the presence of LC-PUFAs. No other different fatty acids were detected in these transgenic soybean seeds other than DHA and DPA(n-6). The oil content (sum of the masses of the individual FAMEs divided by seed mass) of the transgenic seeds and the number of seeds produced by the transgenic T₁ lines was not significantly different from that of the nontransgenic Williams 82 control cultivar grown in the greenhouse at the same time under the same conditions.

[0300] The complete FAMEs profiles of individual T₂ seeds from soybean events 7362[708]-70801.001 and 7362[710]-71005.001 are shown in Table 10.

TABLE 10
FAMEs profiles of individual T₂ soybean seeds from two events 7362[708]-70801.001 and
7362[710]-71005.001. Values are percentages of the total FAME content from the 10 to 12 T₂ soybean seeds. Total LC-PUFA is the sum
of C22:5 (DPA n-6) and C22:6 (DHA) FAME percentage.

| | | | | | | | | | | | C22:5 | | Total |
|---|---|---|---|---|---|---|---|---|---|---|---|---|---|
| | | | | | | | | | | | (DPA | C22:6 | LC- |
| Event Name | C14:0 | C16:0 | C18:0 | C18:1 | C18:2 | C18:3 | C20:0 | C20:1 | C22:0 | C24:0 | n-6) | (DHA) | PUFA |
| 7362[708]-70801.Sx.021 | 0.16 | 12.99 | 4.98 | 13.84 | 58.09 | 7.88 | 0.36 | 0.16 | 0.22 | 0.11 | 0.46 | 0.73 | 1.19 |
| 7362[710]-71005.Sx.006 | 0.19 | 13.09 | 4.8 | 22.71 | 50.56 | 5.37 | 0.32 | 0.17 | 0.25 | 0.1 | 0.83 | 1.61 | 2.44 |
| 7362[710]-71005.Sx.010 | 0.15 | 12.88 | 5.56 | 16.25 | 55.06 | 6.44 | 0.38 | 0.17 | 0.18 | 0.11 | 1.19 | 1.63 | 2.82 |
| 7362[710]-71005.Sx.012 | 0.18 | 13.41 | 4.15 | 13.67 | 56.63 | 7.09 | 0.35 | 0.16 | 0.21 | 0.11 | 1.58 | 2.46 | 4.04 |
| 7362[710]-71005.Sx.013 | 0.22 | 14.3 | 4.4 | 19.13 | 51.2 | 5.89 | 0.31 | 0.15 | 0.18 | 0.1 | 1.53 | 2.59 | 4.12 |
| 7362[710]-71005.Sx.016 | 0.21 | 14.3 | 4.16 | 15.41 | 55.84 | 6.24 | 0.3 | 0.15 | 0.17 | 0.08 | 1.23 | 1.91 | 3.15 |
| 7362[710]-71005.Sx.018 | 0.17 | 13.88 | 4.65 | 15.3 | 55.14 | 6.26 | 0.35 | 0.16 | 0.19 | 0.08 | 1.5 | 2.32 | 3.82 |
| 7362[710]-71005.Sx.025 | 0.17 | 13.29 | 4.74 | 15.03 | 54.94 | 6.2 | 0.37 | 0.17 | 0.21 | 0.09 | 1.93 | 2.84 | 4.77 |
| 7362[710]-71005.Sx.031 | 0 | 13.42 | 4.5 | 16.4 | 55.73 | 6.13 | 0.19 | 0.1 | 0.24 | 0.06 | 1.27 | 1.96 | 3.23 |
| 7362[710]-71005.Sx.035 | 0.16 | 13.13 | 3.96 | 18.39 | 53.15 | 7.18 | 0.14 | 0.11 | 0.21 | 0 | 1.49 | 2.08 | 3.56 |
| Williams 82 Control | 0.06 | 10.37 | 6.25 | 24.12 | 52.88 | 5.46 | 0.33 | 0.14 | 0.3 | 0.09 | 0 | 0 | 0 |

### Example 6.1

### Lipid Analysis of Mature T₃ Seed from Two Transgenic Soybean Events

[0301] Two T₂ soybean plant events, 7362[708]-70801.001 and 7362[710]-71005.001, were grown to maturity in the greenhouse. Multiple plants of each event were grown in the greenhouse, and were screened to identify individual plants that produced high levels of LC-PUFAs in the T₂ cotyledon and contained a single, homozygous insertion of the transgenes. Identified plants were self-fertilized and the resulting T₃ seed was harvested when the seed reached maturity. Single mature T₃ seeds were analyzed via FAMEs GC-FID to determine the DHA and LC-PUFA content in the T₃ soybean seed (FIG. 12a). Twelve whole mature seeds per plant were individually analyzed by crushing the seed with a press and homogenizing the crushed seed material using a steel ball and ball mill. The tissue was defatted three times with hexane, the pooled hexane fractions were evaporated to dryness and the residue weighed and reconstituted in heptane for FAME analysis performed as described in the previous example. The DHA levels were determined from the T₃ seed and compared to the T₂ DHA levels, which had been assayed previously (Table 11).

TABLE 11
Average DHA content (%) from randomly chosen mature soybean seed
at the T2 and T3 generation from two events 7362[708]70801.001 and
7362[710]-71005.001.

| | T₂ seed | | | | T₃ seed | | | |
|---|---|---|---|---|---|---|---|---|
| Event Name | n | Mean | Min | Max | n | Mean | Min | Max |
| pDAB7362[708]70801.001-1-21 | 9 | 0.22 | 0 | 0.73 | 90 | 0.27 | 0 | 0.93 |
| pDAB7362[710]71005.001-1-13 | 12 | 1.79 | 0.82 | 2.59 | 45 | 2.11 | 0.79 | 3.91 |
| pDAB7362[710]71005.001-1-18 | 12 | 1.58 | 0.79 | 2.32 | 48 | 2.00 | 1.05 | 3.54 |
| pDAB7362[710]71005.001-1-25 | 12 | 1.83 | 0.99 | 2.84 | 39 | 2.02 | 0.99 | 4.24 |
| pDAB7362[710]71005.001-1-35 | 12 | 0.59 | 0 | 2.08 | 72 | 0.74 | 0 | 3.10 |
| Williams 82 Control | 8 | 0 | 0 | 0 | 15 | 0 | 0 | 0 |

[0302] As indicated in Table 11, the relative percentage of DHA in soybean seeds remained constant or increased in subsequent generations of soybean (from the T₂ and T₃). Single T₃ seeds produced from self-fertilization of a T₂ plant of event 7362[708]-70801.001 (this line was molecularly characterized and found to possess a single hemizygous copy of PAT) were assayed via the FAMEs analysis and the seeds were determined to contain from 0% to 0.93% DHA (0% to 1.37% total LC-PUFA). Comparatively, the T₂ seeds produced from event 7362[708]-70801.001 were assayed via FAMEs analysis and the seeds were determined to contain from 0% to 0.73% DHA. Single T₃ seeds from self-fertilization of a T₂ plant event 7362[710]-71005.001-1-35 (this line was molecularly characterized and found to possess a single hemizygous copy of PAT) were assayed via the FAMEs analysis and the seeds were determined to contain 0% to 3.10% DHA (0% to 5.45% total LC-PUFA). Comparatively, the T₂ seeds produced from event 7362[710]-71005.001-1-35 were assayed via FAMEs analysis and the seeds were determined to contain from 0% to 2.84% DHA. In addition, Single T₃ seeds produced from events 7362[710]-71005.001-1-13, 7362[710]-71005.001-1-18, and 7362[710]-71005.001-1-25 (each event was determined to contain a single, homozygous copy of PAT) contained 0.79% to 4.24% DHA (1.26% to 6.5% total LC-PUFA). Comparatively, the T₂ seeds produced from events 7362[710]-71005.001-1-13, 7362[710]-71005.001-1-18, and 7362[710]-71005.001-1-25 were assayed via FAMEs analysis and the seeds were determined to contain from 0.79% to 2.84% DHA. The transgenic events were compared to the control plants, the yield per plant (number of seed) and total oil content (%) was found to be similar to the Williams 82 control in similar conditions as the transgenic lines.

[0303] For all lines tested, the percentage of DHA and LC-PUFA that was produced and measured in the soybean seed for the T₂ and T₃ generations was either consistent or increased in levels from the T₂ generation to the T₃ generation. These results indicate that the traits are heritable, and that the transmission of the traits to further generations does not result in reduced DHA production.

### Example 7

### Western Blot Detection of PUFA Synthase Proteins in Transgenic Soybean Seed

[0304] PUFA synthase OrfA (encoded by SzPUFA OrfA v3 gene), PUFA synthase OrfB (encoded by SzPUFA OrfB v3 gene) PUFA synthase chimeric OrfC (encoded by hThSzPUFA OrfC v3 gene) and HetI (from Nostoc sp. PCC 7120, GenBank ID: P37695, GL20141367) were detected in mature transgenic seed samples by Western blot analysis. Residual soybean T₂ seed cake samples were retained after the hexane extraction for FAME analysis. The powdered seed cake was placed in a tube with a single 4.5 mm stainless steel ball and extraction buffer (50 mM Tris, 10 mM EDTA, 2% SDS) was added. The sample tubes were rocked gently for 30 minutes, centrifuged for 15 minutes at 3,000 rcf and the supernatant was used for analysis. The amount of total soluble protein in the seed extract was determined by 660 nm Protein Assay (Thermo Fisher, Rockford, Ill.). Samples were normalized to 1.25 mg/ml total soluble protein and prepared in LDS sample buffer (Invitrogen, Carlsbad, Calif.) with 50 mM DTT for a normalized load of 16.25 μg total soluble protein per lane. Samples were electrophoresed in 3%-8% Tris-acetate gels (Invitrogen, Carlsbad, Calif.) and transferred to nitrocellulose membranes for detection of PUFA synthase OrfA, PUFA synthase OrfB, and PUFA synthase chimeric OrfC. Samples were electroporesed in 4%-12% Bis-Tris gels (Invitrogen, Carlsbad, Calif.) and transferred to nitrocellulose membranes for detection of HetI.

[0305] Blots were incubated in blocking buffer then probed with antibodies against the different PUFA synthase OrfA, PUFA synthase OrfB, PUFA synthase chimeric OrfC, and HetI polypeptides. The rabbit anti-A2-A that is directed against the A2 region of Schizochytrium PUFA Synthase OrfA (SzPUFS-A), the rabbit anti-B3-A that is directed against the B3 region of Schizochytrium PUFA Synthase OrfB (SzPUFS-B), and the rabbit anti-HetI that is directed against the full length HetI polypeptide were used. Region B3 includes the Enoyl Reductase (ER) domain of OrfB. As there is also a homologous ER domain in PUFA synthase chimeric OrfC, this antiserum recognizes both PUFA synthase OrfB and PUFA synthase chimeric OrfC on a western blot. An anti-rabbit fluorescent labeled secondary antibody (Goat Anti-Rabbit AF 633 (Invitrogen, Carlsbad, Calif.)) was used for detection. Blots were visualized on a Typhoon Trio Plus fluorescent imager (GE Healthcare, New Brunswick N.J.).

[0306] SDS-PAGE western blots of proteins extracts from mature T₂ seed from events 7362[708]-70801 and 7362[710]-71005 showed bands at the appropriate size when probed with PUFA synthase OrfA, PUFA synthase OrfB, PUFA synthase chimeric OrfC, and HetI specific antisera (FIG. 13). The bands for PUFA synthase OrfA, PUFA synthase OrfB, and PUFA synthase chimeric OrfC could also be seen by direct staining with Coomassie Blue.

### Example 8

### Expression of the Algal PUFA Synthase Gene Suite Using Alternative Promoters

[0307] The use of additional transcriptional regulatory elements to express the gene(s) encoding PUFA synthase OrfA, PUFA synthase OrfB, PUFA synthase chimeric OrfC, acyl-CoA synthetase and 4′ phosphopantetheinyl transferase HetI proteins can further increase LC-PUFA and DHA content within soybean seeds. Identification and use of transcriptional regulatory elements that express earlier in development during triacylglycerol biosynthesis and deposition, and for extended periods of time can increase the levels of LC-PUFA and DHA within soybean seed by promoting transcription of a LC-PUFA and DHA biosynthetic genes at earlier stages of seed development (e.g., at 15 to 25 DAP) and therefore extend the time of LC-PUFA and DHA production. Examples of such transcriptional regulatory regions include, but are not limited to, the Lesquerella fendleri KCS (LfKCS3) promoter (U.S. Pat. No. 7,253,337) and the FAE 1 promoter (U.S. Pat. No. 6,784,342) and the Brassica oleracea Acyl Carrier Protein (BoACP) promoter (International Publ. No. WO 1992/18634). In addition, other seed specific promoters such as the phaseolin promoter from Phaseolus vulgaris (U.S. Pat. No. 5,504,200) can be used to robustly drive expression of heterologous genes for extended periods of time during seed development to increase the levels of LC-PUFA and DHA within soybean seed. Finally, strong constitutive promoters such as the Cassava Vein Mosaic Virus promoter (CsVMV promoter v2) can be used to drive expression of the heterologous genes throughout all stages of development, thereby increasing the levels of LC-PUFA and DHA within soybean seed and other plant tissues.

[0308] These promoters are used singularly or in combination to drive the expression of the PUFA synthase OrfA, PUFA synthase OrfB, PUFA synthase chimeric OrfC, acyl-CoA synthetase and 4′ phosphopantetheinyl transferase HetI expression cassettes, which were previously described in plasmid, pDAB7362. Methods to replace transcriptional regulatory regions within a plasmid are well known within the art. As such, a polynucleotide fragment comprising the PvDlec2 promoter v2 is removed from pDAB7362 (or the preceding plasmids used to build pDAB7362) and replaced with new promoter regions. The newly constructed plasmids are used to stably transform soybean plants. Transgenic soybean plants are isolated and molecularly characterized. The resulting LC-PUFA accumulation is determined by analyzing the lipid profiles (FAMEs) using methods described herein, and soybean plants that produce 0.01% to 15% DHA by weight of total fatty acids, 0.01% to 10% DPA(n-6) by weight of total fatty acids, or 0.01% to 10% EPA by weight of total fatty acids are identified.

### Use of Promoters that Express Early in Seed Development

### Example 8.1

### Construction of pDAB9166

[0309] The pDAB9166 plasmid (FIG. 14; SEQ ID NO:40) was constructed using a multi-site Gateway L-R recombination reaction. pDAB9166 contains three PUFA synthase PTUs, one phosphopantetheinyl transferase PTU and a phosphinothricin acetyl transferase PTU. Specifically, the first PUFA synthase PTU contains the LfKCS3 promoter v1, SzPUFA OrfA v3 and AtuORF23 3′ UTR v1. The second PUFA synthase PTU contains the LIKCS3 promoter v1, SzPUFA OrfB v3 and AtuOrf23 3′ UTR v1. The third PUFA synthase PTU contains the Lf CS3 promoter v1, hSzThPUFA OrfC v3 and AtuORF23 3′ UTR v1. The phosphopantetheinyl transferase PTU contains the LfKCS3 promoter v1, NoHetI v3 and AtuORF23 3′ UTR v1.

[0310] Plasmids pDAB9161, pDAB9162, pDAB9163, pDAB101484 and pDAB7333 were recombined to form pDAB9166. Specifically, the four PTUs described above were placed in a head-to-tail orientation within the T-strand DNA border regions of the plant transformation binary pDAB7333. The order of the genes is: SzPUFA OrfA v3, SzPUFA OrfB v3, hSzThPUFA OrfC v3, NoHetI v3. pDAB7333 also contains the phosphinothricin acetyl transferase PTU: CsVMV promoter v2, PAT v5, AtuORF1 3′ UTR v4 in addition to other regulatory elements such as Overdrive and T-strand border sequences (T-DNA Border A and T-DNA Border B). Recombinant plasmids containing the five PTUs were then isolated and tested for incorporation of the five PTUs with restriction enzyme digestion and DNA sequencing.

### Example 8.2

### Construction of pDAB9167

[0311] The pDAB9167 plasmid (FIG. 15; SEQ ID NO:41) was constructed using a multi-site Gateway L-R recombination reaction. pDAB9167 contains three PUFA synthase PTUs, one phosphopantetheinyl transferase PTU and a phosphinothricin acetyl transferase PTU. Specifically, the first PUFA synthase PTU contains the LfKCS3 promoter v1, SzPUFA OrfA v3 and AtuORF23 3′ UTR v1. The second PUFA synthase PTU contains the BoACP promoter v1, BoACP 5′ UTR v1, SzPUFA OrfB v3 and AtuOrf23 3′ UTR v1. The third PUFA synthase PTU contains the LfKCS3 promoter v1, hSzThPUFA OrfC v3 and AtuORF23 3′ UTR v1. The phosphopantetheinyl transferase PTU contains the BoACP promoter v1, BoACP 5′ UTR v1, NoHetI v3 and AtuORF23 3′ UTR v1.

[0312] Plasmids pDAB9161, pDAB9165, pDAB9163, pDAB101485 and pDAB7333 were recombined to form pDAB9167. Specifically, the four PTUs described above were placed in a head-to-tail orientation within the T-strand DNA border regions of the plant transformation binary pDAB7333. The order of the genes is: SzPUFA OrfA v3, SzPUFA OrfB v3, hSzThPUFA OrfC v3, NoHetI v3. pDAB7333 also contains the phosphinothricin acetyl transferase PTU: CsVMV promoter v2, PAT v5, AtuORF1 3′ UTR v4 in addition to other regulatory elements such as Overdrive and T-strand border sequences (T-DNA Border A and T-DNA Border B). Recombinant plasmids containing the five PTUs were then isolated and tested for incorporation of the five PTUs with restriction enzyme digestion and DNA sequencing.

### Plasmids Containing the Phaseolin Promoter

### Example 8.3

### Construction of pDAB7379

[0313] pDAB7379 is a binary plasmid that was constructed to contain rebuilt, codon optimized versions of SzPUFA OrfA, SzPUFA OrfB, hSzThPUFA OrfC, and NoHetI. The SzACS-2 gene sequence is not included in this construct. The pDAB7379 plasmid (FIG. 16; SEQ ID NO:42) was constructed using a multi-site Gateway L-R recombination reaction.

[0314] pDAB7379 contains three PUFA synthase PTUs, one phosphopantetheinyl transferase PTU and a phosphinothricin acetyl transferase PTU. Specifically, the first PUFA synthase PTU contains the PvPhas Promoter v3, PvPhas 5′ UTR, SzPUFA OrfA v3 and AtuORF23 3′ UTR v1. The second PUFA synthase PTU contains the PvPhas Promoter v3, PvPhas 5′ UTR, SzPUFA OrfB v3 and AtuORF23 3′ UTR v1. The third PUFA synthase PTU contains the PvPhas Promoter v3, PvPhas 5′ UTR, hSzThPUFA OrfC v3 and AtuORF23 3′ UTR v1. The phosphopantetheinyl transferase PTU contains the PvPhas Promoter v3, PvPhas 5′ UTR, NoHetI v3 and AtuORF23 3′ UTR v1.

[0315] Plasmids pDAB7371, pDAB7372, pDAB7373, pDAB7374 and pDAB7333 were recombined to form pDAB7379. Specifically, the four PTUs described above were placed in a head-to-tail orientation within the T-strand DNA border regions of the plant transformation binary pDAB7333. The order of the genes is: SzPUFA OrfA v3, SzPUFA OrfB v3, hSzThPUFA OrfC v3, NoHetI v3. pDAB7333 also contains the phosphinothricin acetyl transferase PTU: CsVMV promoter v2, PAT v5, AtuORF1 3′ UTR v4 in addition to other regulatory elements such as Overdrive and T-strand border sequences (T-DNA Border A and T-DNA Border B). Recombinant plasmids containing the five PTUs were then isolated and tested for incorporation of the five PTUs with restriction enzyme digestion and DNA sequencing.

### Example 8.4

### Construction of DAB7380

[0316] pDAB7380 is a binary plasmid that was constructed to contain rebuilt, codon optimized versions of SzPUFA OrfA, SzPUFA OrfB, hSzThPUFA OrfC, and NoHetI. The SzACS-2 gene sequence is not contained in this construct. The version of the phaseolin promoter used in this construct was modified essentially as described in Bustos et al., 1989 (The Plant Cell, Vol. 1; 839-853), wherein the 5′ portion of the promoter was truncated and the phaseolin 5′ untranslated region was left intact. The pDAB7380 plasmid (FIG. 17; SEQ ID NO:43) was constructed using a multi-site Gateway L-R recombination reaction.

[0317] pDAB7380 contains three PUFA synthase PTUs, one phosphopantetheinyl transferase PTU and a phosphinothricin acetyl transferase PTU. Specifically, the first PUFA synthase PTU contains the PvPhas Promoter v4, PvPhas 5′ UTR, SzPUFA OrfA v3 and AtuORF23 3′ UTR v1. The second PUFA synthase PTU contains the PvPhas Promoter v4, PvPhas 5′ UTR, SzPUFA OrfB v3 and AtuORF23 3′ UTR v1. The third PUFA synthase PTU contains the PvPhas Promoter v4, PvPhas 5′ UTR, hSzThPUFA OrfC v3 and AtuORF23 3′ UTR v1. The phosphopantetheinyl transferase PTU contains the PvPhas Promoter v5, PvPhas 5′ UTR, NoHetI v3 and AtuORF23 3′ UTR v1.

[0318] Plasmids pDAB7375, pDAB7376, pDAB7377, pDAB7378 and pDAB7333 were recombined to form pDAB7380. Specifically, the four PTUs described above were placed in a head-to-tail orientation within the T-strand DNA border regions of the plant transformation binary pDAB7333. The order of the genes is: SzPUFA OrfA v3, SzPUFA OrfB v3, hSzThPUFA OrfC v3, NoHetI v3. pDAB7333 also contains the phosphinothricin acetyl transferase PTU: CsVMV promoter v2, PAT v5, AtuORF1 3′ UTR v4 in addition to other regulatory elements such as Overdrive and T-strand border sequences (T-DNA Border A and T-DNA Border B). Recombinant plasmids containing the five PTUs were then isolated and tested for incorporation of the five PTUs with restriction enzyme digestion and DNA sequencing.

### Example 8.5

### Construction of DAB9323

[0319] pDAB9323 is a binary plasmid that was constructed to contain native, non-codon optimized versions of SzPUFA OrfA, SzPUFA OrfB, hSzThPUFA OrfC, SzACS-2, and NoHetI. The pDAB9323 plasmid (FIG. 18; SEQ ID NO:44) was constructed using a multi-site Gateway L-R recombination reaction.

[0320] pDAB9323 contains three PUFA synthase PTUs, one acyl-CoA synthetase PTU, one phosphopantetheinyl transferase PTU and a phosphinothricin acetyl transferase PTU. Specifically, the first PUFA synthase PTU contains the PvPhas Promoter v3, PvPhas 5′ UTR, SzPUFA OrfA v2, PvPhas 3′ UTR v1 and PvPhas 3′ MAR v2 (unannotated on the plasmid map). The second PUFA synthase PTU contains the PvPhas Promoter v3, PvPhas 5′ UTR, SzPUFA OrfB v2, PvPhas 3′ UTR v1 and PvPhas 3′ MAR v2 (unannotated on the plasmid map). The third PUFA synthase PTU contains the PvPhas Promoter v3, PvPhas 5′ UTR, SzPUFA OrfC v2, PvPhas 3′ UTR v1 and PvPhas 3′ MAR v2 (unannotated on the plasmid map). The acyl-CoA synthetase PTU contains the PvPhas Promoter v3, PvPhas 5′ UTR, SzACS-2 v2 gene, PvPhas 3′ UTR v1 and PvPhas 3′ MAR v2 (unannotated on the plasmid map). The phosphopantetheinyl transferase PTU contains the PvPhas Promoter v3, PvPhas 5′ UTR, NoHetI v2, PvPhas 3′ UTR v1 and PvPhas 3′ MAR v2 (unannotated on the plasmid map).

[0321] Plasmids pDAB9307, pDAB9311, pDAB9315, pDAB9322 and pDAB7333 were recombined to form pDAB9323. Specifically, the five PTUs described above were placed in a head-to-tail orientation within the T-strand DNA border regions of the plant transformation binary pDAB7333. The order of the genes is: SzPUFA OrfA v2, SzPUFA OrfB v2, SzPUFA OrfC v2, NoHetI v2. pDAB7333 also contains the phosphinothricin acetyl transferase PTU: CsVMV promoter v2, PAT v5, AtuORF1 3′ UTR v4 in addition to other regulatory elements such as Overdrive and T-strand border sequences (T-DNA Border A and T-DNA Border B). Recombinant plasmids containing the six PTUs were then isolated and tested for incorporation of the six PTUs with restriction enzyme digestion and DNA sequencing.

### Example 8.6

### Construction of pDAB9330

[0322] pDAB9330 is a binary plasmid that was constructed to contain rebuilt, codon optimized versions of SzPUFA OrfA, SzPUFA OrfB, hSzThPUFA OrfC, SzACS-2, and NoHetI. The pDAB9330 plasmid (FIG. 19; SEQ ID NO:45) was constructed using a multi-site Gateway L-R recombination reaction. pDAB9330 contains three PUFA synthase PTUs, one acyl-CoA synthetase PTU, one phosphopantetheinyl transferase PTU and a phosphinothricin acetyl transferase PTU. Specifically, the first PUFA synthase PTU contains the PvPhas Promoter v3, PvPhas 5′ UTR, SzPUFA OrfA v3, PvPhas 3′ UTR v1 and PvPhas 3′ MAR v2 (unannotated on the plasmid map). The second PUFA synthase PTU contains the PvPhas Promoter v3, PvPhas 5′ UTR, SzPUFA OrfB v3, PvPhas 3′ UTR and PvPhas 3′ MAR v2 (unannotated on the plasmid map). The third PUFA synthase PTU contains the PvPhas Promoter v3, PvPhas 5′ UTR, hSzThPUFA OrfC v3, PvPhas 3′ UTR v1 and PvPhas 3′ MAR v2 (unannotated on the plasmid map). The acyl-CoA synthetase PTU contains the PvPhas Promoter v3, PvPhas 5′ UTR, SzACS-2 v3 gene, PvPhas 3′ UTR v1 and PvPhas 3′ MAR v2 (unannotated on the plasmid map). The phosphopantetheinyl transferase PTU contains the PvPhas Promoter v3, PvPhas 5′ UTR, NoHetI v3, PvPhas 3′ UTR v1 and PvPhas 3′ MAR v2 (unannotated on the plasmid map).

[0323] Plasmids pDAB9324, pDAB9325, pDAB9326, pDAB9329 and pDAB7333 were recombined to form pDAB9330. Specifically, the five PTUs described above were placed in a head-to-tail orientation within the T-strand DNA border regions of the plant transformation binary pDAB7333. The order of the genes is: SzPUFA OrfA v3, SzPUFA OrfB v3, hSzThPUFA OrfC v3, SzACS-2 v3, NoHetI v3. pDAB7333 also contains the phosphinothricin acetyl transferase PTU: CsVMV promoter v2, PAT v5, AtuORF1 3′ UTR v4 in addition to other regulatory elements such as Overdrive and T-strand border sequences (T-DNA Border A and T-DNA Border B). Recombinant plasmids containing the six PTUs were then isolated and tested for incorporation of the six PTUs with restriction enzyme digestion and DNA sequencing.

### Example 8.7

### Construction of pDAB9337

[0324] pDAB9337 is a binary plasmid that was constructed to contain rebuilt, codon optimized versions of SzPUFA OrfA, SzPUFA OrfB, hSzThPUFA OrfC, and NoHetI expression of which is driven by the phaseolin promoter. The pDAB9337 plasmid (FIG. 20; SEQ ID NO:46) was constructed using a multi-site Gateway L-R recombination reaction.

[0325] pDAB9337 contains three PUFA synthase PTUs, one phosphopantetheinyl transferase PTU and a phosphinothricin acetyl transferase PTU. Specifically, the first PUFA synthase PTU contains the PvPhas Promoter v3, PvPhas 5′ UTR, SzPUFA OrfA v3, PvPhas 3′ UTR v1 and PvPhas 3′ MAR v2 (unannotated on the plasmid map). The second PUFA synthase PTU contains the PvPhas Promoter v3, PvPhas 5′ UTR, SzPUFA OrfB v3, PvPhas 3′ UTR v1 and PvPhas 3′ MAR v2 (unannotated on the plasmid map). The third PUFA synthase PTU contains the PvPhas Promoter v3, PvPhas 5′ UTR, hSzThPUFA OrfC v3, PvPhas 3′ UTR v1 and PvPhas 3′ MAR v2 (unannotated on the plasmid map). The phosphopantetheinyl transferase PTU contains the PvPhas Promoter v3, PvPhas 5′ UTR, NoHetI v3, PvPhas 3′ UTR v1 and PvPhas 3′ MAR v2 (unannotated on the plasmid map).

[0326] Plasmids pDAB9324, pDAB9325, pDAB9326, pDAB9328 and pDAB7333 were recombined to form pDAB9337. Specifically, the four PTUs described above were placed in a head-to-tail orientation within the T-strand DNA border regions of the plant transformation binary pDAB7333. The order of the genes is: SzPUFA OrfA v3, SzPUFA OrfB v3, hSzThPUFA OrfC v3, NoHetI v3. pDAB7333 also contains the phosphinothricin acetyl transferase PTU: CsVMV promoter v2, PAT v5, AtuORF1 3′ UTR v4 in addition to other regulatory elements such as Overdrive and T-strand border sequences (T-DNA Border A and T-DNA Border B). Recombinant plasmids containing the five PTUs were then isolated and tested for incorporation of the five PTUs with restriction enzyme digestion and DNA sequencing.

### Example 8.8

### Construction of pDAB9338

[0327] pDAB9338 is a binary plasmid that was constructed to contain rebuilt, codon optimized versions of SzPUFA OrfA, SzPUFA OrfB, hSzThPUFA OrfC, and NoHetI. The phaseolin promoter is used to drive expression of SzPUFA OrfA, and PvDlec2 promoter is used to drive the other transgenes. The pDAB9338 plasmid (FIG. 21; SEQ ID NO:47) was constructed using a multi-site Gateway L-R recombination reaction.

[0328] pDAB9338 contains three PUFA synthase PTUs, one phosphopantetheinyl transferase PTU and a phosphinothricin acetyl transferase PTU. Specifically, the first PUFA synthase PTU contains the PvPhas Promoter v3, PvPhas 5′ UTR, SzPUFA OrfA v3, PvPhas 3′ UTR v1 and PvPhas 3′ MAR v2 (unannotated on the plasmid map). The second PUFA synthase PTU contains the PvDlec2 promoter v2, 2S 5′ UTR, SzPUFA OrfB v3 and At2S SSP terminator v1. The third PUFA synthase PTU contains the PvDlec2 promoter v2, 2S 5′ UTR, hSzThPUFA OrfC v3 and At2S SSP terminator v1. The phosphopantetheinyl transferase PTU contains the PvDlec2 promoter v2, 2S 5′ UTR, NoHetI v3 and At2S SSP terminator v1.

[0329] Plasmids pDAB9324, pDAB7335, pDAB7336, pDAB7338 and pDAB7333 were recombined to form pDAB9338. Specifically, the four PTUs described above were placed in a head-to-tail orientation within the T-strand DNA border regions of the plant transformation binary pDAB7333. The order of the genes is: SzPUFA OrfA v3, SzPUFA OrfB v3, hSzThPUFA OrfC v3, NoHetI v3. pDAB7333 also contains the phosphinothricin acetyl transferase PTU: CsVMV promoter v2, PAT v5, AtuORF1 3′ UTR v4 in addition to other regulatory elements such as Overdrive and T-strand border sequences (T-DNA Border A and T-DNA Border B). Recombinant plasmids containing the five PTUs were then isolated and tested for incorporation of the five PTUs with restriction enzyme digestion and DNA sequencing.

### Example 8.9

### Construction of pDAB9344

[0330] pDAB9344 is a binary plasmid that was constructed to contain rebuilt, codon optimized versions of SzPUFA OrfA, SzPUFA OrfB, hSzThPUFA OrfC, and NoHetI all of which contain the Ribulose Bisphosphate Carboxylase small chain 1A (labeled as SSU-TP v1), which is fused to the amino terminus of the coding sequence. The phaseolin promoter is used to drive expression of SzPUFA OrfA, and PvDlec2 promoter is used to drive the other transgenes.

[0331] The pDAB9344 plasmid (FIG. 22; SEQ ID NO:48) was constructed using a multi-site Gateway L-R recombination reaction. pDAB9344 contains three PUFA synthase PTUs, one phosphopantetheinyl transferase PTU and a phosphinothricin acetyl transferase PTU. Specifically, the first PUFA synthase PTU contains the PvPhas Promoter v3, PvPhas 5′ UTR, SzPUFA OrfA v4, PvPhas 3′ UTR v1 and PvPhas 3′ MAR v2 (unannotated on the plasmid map). The second PUFA synthase PTU contains the PvPhas Promoter v3, PvPhas 5′ UTR, SzPUFA OrfB v4, PvPhas 3′ UTR v1 and PvPhas 3′ MAR v2 (unannotated on the plasmid map). The third PUFA synthase PTU contains the PvPhas Promoter v3, PvPhas 5′ UTR, hSzThPUFA OrfC v4, PvPhas 3′ UTR v1 and PvPhas 3′ MAR v2 (unannotated on the plasmid map). The phosphopantetheinyl transferase PTU contains the PvPhas Promoter v3, PvPhas 5′ UTR, NoHetI v4, PvPhas 3′ UTR v1 and PvPhas 3′ MAR v2 (unannotated on the plasmid map).

[0332] Plasmids pDAB9343, pDAB9342, pDAB9340, pDAB9331 and pDAB7333 were recombined to form pDAB9344. Specifically, the four PTUs described above were placed in a head-to-tail orientation within the T-strand DNA border regions of the plant transformation binary pDAB7333. The order of the genes is: SzPUFA OrfA v4, SzPUFA OrfB v4, hSzThPUFA OrfC v4, NoHetI v4. pDAB7333 also contains the phosphinothricin acetyl transferase PTU: CsVMV promoter v2, PAT v5, AtuORF1 3′ UTR v4 in addition to other regulatory elements such as Overdrive and T-strand border sequences (T-DNA Border A and T-DNA Border B). Recombinant plasmids containing the six PTUs were then isolated and tested for incorporation of the five PTUs with restriction enzyme digestion and DNA sequencing.

### Example 8.10

### Construction of DAB9396

[0333] pDAB9396 is a binary plasmid that was constructed to contain rebuilt, codon optimized versions of SzPUFA OrfA, SzPUFA OrfB, hSzThPUFA OrfC, SzACS-2, and NoHetI. The phaseolin promoter is used to drive expression of SzPUFA OrfA and SzPUFA OrfB. The PvDlec2 promoter is used to drive the other transgenes; hSzThPUFA OrfC, SzACS-2, and NoHetI.

[0334] The pDAB9396 plasmid (FIG. 23; SEQ ID NO:49) was constructed using a multi-site Gateway L-R recombination reaction. pDAB9396 contains three PUFA synthase PTUs, one phosphopantetheinyl transferase PTU and a phosphinothricin acetyl transferase PTU. Specifically, the first PUFA synthase PTU contains the PvPhas Promoter v3, PvPhas 5′ UTR, SzPUFA OrfA v3, PvPhas 3′ UTR v1 and PvPhas 3′ MAR v2 (unannotated on the plasmid map). The second PUFA synthase PTU contains the PvDlec2 promoter v2, 2S 5′ UTR, SzPUFA OrfB v3 and At2S SSP terminator v1. The third PUFA synthase PTU contains the PvDlec2 promoter v2, 2S 5′ UTR, hSzThPUFA OrfC v3 and At2S SSP terminator v1. The acyl-CoA synthetase PTU contains the PvPhas Promoter v3, PvPhas 5′ UTR, SzACS-2 v3 gene, PvPhas 3′ UTR v1 and PvPhas 3′ MAR v2 (unannotated on the plasmid map). The phosphopantetheinyl transferase PTU contains the PvDlec2 promoter v2, 2S 5′ UTR, NoHetI v3 and At2S SSP terminator v1.

[0335] Plasmids pDAB9324, pDAB7335, pDAB7336, pDAB7339 and pDAB7333 were recombined to form pDAB9338. Specifically, the five PTUs described above were placed in a head-to-tail orientation within the T-strand DNA border regions of the plant transformation binary pDAB7333. The order of the genes is: SzPUFA OrfA v3, SzPUFA OrfB v3, hSzThPUFA OrfC v3, SzACS-2 v3, NoHetI v3. pDAB7333 also contains the phosphinothricin acetyl transferase PTU: CsVMV promoter v2, PAT v5, AtuORF1 3′ UTR v4 in addition to other regulatory elements such as Overdrive and T-strand border sequences (T-DNA Border A and T-DNA Border B). Recombinant plasmids containing the five PTUs were then isolated and tested for incorporation of the six PTUs with restriction enzyme digestion and DNA sequencing.

### Example 8.11

### Construction of pDAB101412

[0336] pDAB101412 is a binary plasmid that was constructed to contain rebuilt, codon optimized versions of SzPUFA OrfA, SzPUFA OrfB, hSzThPUFA OrfC, SzACS-2, and NoHetI. The version of the phaseolin promoter used in this construct was modified essentially as described in Bustos et al., 1989 (The Plant Cell, Vol. 1; 839-853), wherein the 5′ portion of the promoter was truncated and the phaseolin 5′ untranslated region was left intact. The truncated phaseolin promoter sequences are identified throughout this application as version 4 (v4), version 5 (v5), and version 6 (v6). The pDAB101412 plasmid (FIG. 24; SEQ ID NO:50) was constructed using a multi-site Gateway L-R recombination reaction.

[0337] pDAB101412 contains three PUFA synthase PTUs, one acyl-CoA synthetase PTU, one phosphopantetheinyl transferase PTU and a phosphinothricin acetyl transferase PTU. Specifically, the first PUFA synthase PTU contains the PvPhas Promoter v4, PvPhas 5′ UTR, SzPUFA OrfA v3 and AtuORF23 3′ UTR v1. The second PUFA synthase PTU contains the PvPhas Promoter v4, PvPhas 5′ UTR, SzPUFA OrfB v3 and AtuORF23 3′ UTR v1. The third PUFA synthase PTU contains the PvPhas Promoter v4, PvPhas 5′ UTR, hSzThPUFA OrfC v3 and AtuORF23 3′ UTR v1. The acyl-CoA synthetase PTU contains the PvPhas Promoter v4, PvPhas 5′ UTR, 2S 5′ UTR, SzACS-2 v3 gene and AtuORF23 5′ UTR v1. The phosphopantetheinyl transferase PTU contains the PvPhas Promoter v5, PvPhas 5′ UTR, NoHetI v3 and AtuORF23 3′ UTR v1.

[0338] Plasmids pDAB7375, pDAB7376, pDAB7377, pDAB7398 and pDAB7333 were recombined to form pDAB101412. Specifically, the five PTUs described above were placed in a head-to-tail orientation within the T-strand DNA border regions of the plant transformation binary pDAB7333. The order of the genes is: SzPUFA OrfA v3, SzPUFA OrfB v3, hSzThPUFA OrfC v3, SzACS-2 v3, NoHetI v3. pDAB7333 also contains the phosphinothricin acetyl transferase PTU: CsVMV promoter v2, PAT v5, AtuORF1 3′ UTR v4 in addition to other regulatory elements such as Overdrive and T-strand border sequences (T-DNA Border A and T-DNA Border B). Recombinant plasmids containing the five PTUs were then isolated and tested for incorporation of the six PTUs with restriction enzyme digestion and DNA sequencing.

Soybean Transformation with Promoters that Express Early in Seed Development

[0339] The plasmids are used to stably transform soybean plants using the protocols described above. Transgenic soybean plants are isolated and molecularly characterized. The use of alternative constructs result in soybean plants that contain greater amounts of DHA and LC-PUFAs. The resulting LC-PUFA accumulation is determined and soybean plants that produce 0.01% to 15% DHA or 0.01% to 15% LC-PUFA are identified.

### Example 9

### Expression of the Algal PUFA Synthase Gene Suite Using Alternative Construct Designs

### Introducing Promoter Diversity to Reduce the Duplication of Regulatory Elements

[0340] Gene silencing is a phenomenon that has been observed in progeny generations of transgenic soybean events. Several review articles discuss Transcriptional Gene Silencing (TGS) and Post Transcriptional Gene Silencing (PTGS), such as those of Waterhouse I., 2001 (Nature 411:834-842), Vaucheret and Fagard, 2001 (Trends in Genetics 17(1):29-35, and Okamoto and Hirochika, 2001 (Trends in Plant Sci. 6 (11): 527-534). In plants, gene silencing can be triggered by the duplication of transgenic polynucleotide sequences (tandem repeat transgene sequences, inverted repeat transgene sequences, or multiple insertions into the chromosome) or when a sequence homologous to the target gene sequences is carried either by an infecting plant virus or by the T-DNA of Agrobacterium tumefaciens.

[0341] In addition, the duplication of transgene polynucleotide sequences can act as triggers for construct instability. Multiple transgene sequences that share high levels of sequence similarity can fold back on one another. Rearrangements can occur via homologous recombination, wherein intervening sequences of DNA are excised. As a result, fragments of DNA that are located between repeated transgene polynucleotide sequences are excised.

[0342] One strategy in designing plasmid vectors is to introduce promoter diversity into a construct by incorporating multiple, unique seed specific promoters that maintain high level expression of each transgene. Introducing promoter sequence diversity into the plasmid vectors can reduce gene silencing and improve plasmid stability. Multiple seed specific promoters include PvDlec2, Phaseolin, and Napin (U.S. Pat. No. 5,608,152). These promoters are relatively comparable in promoter activity such as tissue specificity, levels of expression, duration of expression, etc.

### Example 9.1

### Construction of pDAB7733

[0343] The pDAB7733 binary plasmid (FIG. 25; SEQ ID NO:51) was constructed using a multi-site Gateway L-R recombination reaction. pDAB7733 contains three PUFA synthase PTUs, one phosphopantetheinyl transferase PTU and a phosphinothricin acetyl transferase PTU. Specifically, the first PUFA synthase PTU contains the PvPhas promoter v4, PvPhas 5′ UTR, SzPUFA OrfA v3 and AtuORF23 3′ UTR v1. The second PUFA synthase PTU contains the BnaNapinC promoter v1 BnaNapinC 5′ UTR, SzPUFA OrfB v3 and BnaNapinC 3′ UTR v1. The third PUFA synthase PTU contains the PvDlec2 promoter v2, 2S 5′ UTR, hSzThPUFA OrfC v3 and At2S SSP terminator v1. The phosphopantetheinyl transferase PTU contains the PvPhas promoter v5, PvPhas 5′ UTR, NoHetI v3 and AtuOrf23 3′ UTR v1.

[0344] Plasmids pDAB7375, pDAB7731, pDAB7336, pDAB7378 and pDAB7333 were recombined to form pDAB7733. Specifically, the four PTUs described above were placed in a head-to-tail orientation within the T-strand DNA border regions of the plant transformation binary pDAB7333. The order of the genes is: SzPUFA OrfA v3, SzPUFA OrfB v3, hSzThPUFA OrfC v3, NoHetI v3. pDAB7333 also contains the phosphinothricin acetyl transferase PTU: CsVMV promoter v2, PAT v5, AtuORF1 3′ UTR v4 in addition to other regulatory elements such as Overdrive and T-strand border sequences (T-DNA Border A and T-DNA Border B). Recombinant plasmids containing the five PTUs were then isolated and tested for incorporation of the five PTUs with restriction enzyme digestion and DNA sequencing.

### Example 9.2

### Construction of pDAB7734

[0345] The pDAB7734 binary plasmid (FIG. 26; SEQ ID NO:52) was constructed using a multi-site Gateway L-R recombination reaction. pDAB7734 contains three PUFA synthase PTUs, one phosphopantetheinyl transferase PTU and a phosphinothricin acetyl transferase PTU. Specifically, the first PUFA synthase PTU contains the PvDlec2 promoter v2, 2S 5′ UTR, SzPUFA OrfA v3 and At2S SSP terminator v1. The second PUFA synthase PTU contains the PvPhas promoter v4, PvPhas 5′ UTR, SzPUFA OrfB v3 and AtuORF23 3′ UTR v1. The third PUFA synthase PTU contains the BnaNapinC promoter v1, BnaNapinC 5′ UTR, hSzThPUFA OrfC v3 and BnaNapinC 3′ UTR v1. The phosphopantetheinyl transferase PTU contains the PvDlec2 promoter v2, 2S 5′ UTR, NoHetI v3 and At2S SSP terminator v1.

[0346] Plasmids pDAB7334, pDAB7376, pDAB7732, pDAB7338 and pDAB7333 were recombined to form pDAB7734. Specifically, the four PTUs described above were placed in a head-to-tail orientation within the T-strand DNA border regions of the plant transformation binary pDAB7333. The order of the genes is: SzPUFA OrfA v3, SzPUFA OrfB v3, hSzThPUFA OrfC v3, NoHetI v3. pDAB7333 also contains the phosphinothricin acetyl transferase PTU: CsVMV promoter v2, PAT v5, AtuORF1 3′ UTR v4 in addition to other regulatory elements such as Overdrive and T-strand border sequences (T-DNA Border A and T-DNA Border B). Recombinant plasmids containing the five PTUs were then isolated and tested for incorporation of the five P TUs with restriction enzyme digestion and DNA sequencing.

### Example 9.3

### Construction of pDAB101493

[0347] The pDAB101493 binary plasmid (FIG. 27; SEQ ID NO:53) was constructed using a multi-site Gateway L-R recombination reaction. pDAB101493 contains three PUFA synthase PTUs, one phosphopantetheinyl transferase PTU and a phosphinothricin acetyl transferase PTU. Specifically, the first PUFA synthase PTU contains the PvDlec2 promoter v2, 2S 5′ UTR, SzPUFA OrfA v3 and At2S SSP terminator v1. The second PUFA synthase PTU contains the PvPhas promoter v4, PvPhas 5′ UTR, SzPUFA OrfB v3 and AtuORF23 3′ UTR v1. The third PUFA synthase PTU contains the PvDlec2 promoter v2, 2S 5′ UTR, hSzThPUFA OrfC v3 and At2S SSP terminator v1. The phosphopantetheinyl transferase PTU contains the PvPhas promoter v5, PvPhas 5′ UTR, NoHetI v3 and AtuOrf23 3′ UTR v1.

[0348] Plasmids pDAB7334, pDAB7376, pDAB7336, pDAB7378 and pDAB7333 were recombined to foam pDAB101493. Specifically, the four PTUs described above were placed in a head-to-tail orientation within the T-strand DNA border regions of the plant transformation binary pDAB7333. The order of the genes is: SzPUFA OrfA v3, SzPUFA OrfB v3, hSzThPUFA OrfC v3, NoHetI v3. pDAB7333 also contains the phosphinothricin acetyl transferase PTU: CsVMV promoter v2, PAT v5, AtuORF1 3 ′UTR v4 in addition to other regulatory elements such as Overdrive and T-strand border sequences (T-DNA Border A and T-DNA Border B). Recombinant plasmids containing the five PTUs were then isolated and tested for incorporation of the five PTUs with restriction enzyme digestion and DNA sequencing.

### Example 9.4

### Construction of pDAB109507

[0349] The pDAB109507 plasmid (FIG. 28; SEQ ID NO:54) was constructed using a multi-site Gateway L-R recombination reaction. pDAB109507 contains three PUFA synthase PTUs, one phosphopantetheinyl transferase PTU and a phosphinothricin acetyl transferase PTU. Specifically, the first PUFA synthase PTU contains the PvPhas promoter v3, PvPhas 5′ UTR, SzPUFA OrfA v3 and PvPhas 3′ UTR v1 and PvPhas 3′ MAR v2 (unannotated on the plasmid map). The second PUFA synthase PTU contains the BnaNapinC promoter v1, BnaNapinC 5′ UTR, SzPUFA OrfB v3 and BnaNapinC 3′ UTR v1. The third PUFA synthase PTU contains the PvDlec2 promoter v2, 2S 5′ UTR, hSzThPUFA OrfC v3 and At2S SSP terminator v1. The phosphopantetheinyl transferase PTU contains the BoACP promoter/5′ UTR v1, NoHetI v3 and AtuOrf23 3′ UTR v1.

[0350] Plasmids pDAB9324, pDAB7731, pDAB7336, pDAB101485 and pDAB7333 were recombined to form pDAB109507. Specifically, the four PTUs described above were placed in a head-to-tail orientation within the T-strand DNA border regions of the plant transformation binary pDAB7333. The order of the genes is: SzPUFA OrfA v3, SzPUFA OrfB v3, hSzThPUFA OrfC v3, NoHetI v3. pDAB7333 also contains the phosphinothricin acetyl transferase PTU: CsVMV promoter v2, PAT v5, AtuORF1 3′ UTR v4 in addition to other regulatory elements such as Overdrive and T-strand border sequences (T-DNA Border A and T-DNA Border B). Recombinant plasmids containing the five PTUs were then isolated and tested for incorporation of the five PTUs with restriction enzyme digestion and DNA sequencing.

### Example 9.5

### Construction of pDAB109508

[0351] The pDAB109508 plasmid (FIG. 29; SEQ ID NO:55) was constructed using a multi-site Gateway L-R recombination reaction. pDAB109508 contains three PUFA synthase PTUs, one phosphopantetheinyl transferase PTU and a phosphinothricin acetyl transferase PTU. Specifically, the first PUFA synthase PTU contains the PvPhas promoter v3, PvPhas 5′ UTR, SzPUFA OrfA v3 and PvPhas 3′ UTR v1 and PvPhas 3′ MAR v2 (unannotated on the plasmid map). The second PUFA synthase PTU contains the BnaNapinC promoter v1, BnaNapinC 5′ UTR, SzPUFA OrfB v3 and BnaNapinC 3′ UTR v1. The third PUFA synthase PTU contains the PvDlec2 promoter v2, 2S 5′ UTR, hSzThPUFA OrfC v3 and At2S SSP terminator v1. The phosphopantetheinyl transferase PTU contains the PvDlec2 promoter v2, 2S 5′ UTR, NoHetI v3 and At2S SSP terminator v1.

[0352] Plasmids pDAB9324, pDAB7731, pDAB7336, pDAB7338 and pDAB7333 were recombined to form pDAB109508. Specifically, the four PTUs described above were placed in a head-to-tail orientation within the T-strand DNA border regions of the plant transformation binary pDAB7333. The order of the genes is: SzPUFA OrfA v3, SzPUFA OrfB v3, hSzThPUFA OrfC v3, NoHetI v3. pDAB7333 also contains the phosphinothricin acetyl transferase PTU: CsVMV promoter v2, PAT v5, AtuORF1 3′ UTR v4 in addition to other regulatory elements such as Overdrive and T-strand border sequences (T-DNA Border A and T-DNA Border B). Recombinant plasmids containing the five PTUs were then isolated and tested for incorporation of the five PTUs with restriction enzyme digestion and DNA sequencing.

### Example 9.6

### Construction of pDAB109509

[0353] The pDAB109509 plasmid (FIG. 30; SEQ ID NO:56) was constructed using a multi-site Gateway L-R recombination reaction. pDAB109509 contains three PUFA synthase PTUs, one phosphopantetheinyl transferase PTU and a phosphinothricin acetyl transferase PTU. Specifically, the first PUFA synthase PTU contains the PvDlec2 promoter v2, 2S 5′ UTR, SzPUFA OrfA v3 and At2S SSP terminator v1. The second PUFA synthase PTU contains the PvDlec2 promoter v2, 2S 5′ UTR, SzPUFA OrfB v3 and At2S SSP terminator v1. The third PUFA synthase PTU contains the PvDlec2 promoter v2, 2S 5′ UTR, hSzThPUFA OrfC v3 and At2S SSP terminator v1. The phosphopantetheinyl transferase PTU contains the BoACP promoter/5′ UTR v1, NoHetI v3 and AtuOrf23 3′ UTR v1.

[0354] Plasmids pDAB7334, pDAB7335, pDAB7336, pDAB101485 and pDAB7333 were recombined to form pDAB109509. Specifically, the four PTUs described above were placed in a head-to-tail orientation within the T-strand DNA border regions of the plant transformation binary pDAB7333. The order of the genes is: SzPUFA OrfA v3, SzPUFA OrfB v3, hSzThPUFA OrfC v3, NoHetI v3. pDAB7333 also contains the phosphinothricin acetyl transferase PTU: CsVMV promoter v2, PAT v5, AtuORF1 3′ UTR v4 in addition to other regulatory elements such as Overdrive and T-strand border sequences (T-DNA Border A and T-DNA Border B). Recombinant plasmids containing the five PTUs were then isolated and tested for incorporation of the five PTUs with restriction enzyme digestion and DNA sequencing.

### Rearranging the Order of the Binary Construct PTUs to Reduce Fragmentation of Long Gene Sequences

[0355] The SzPUFA OrfA PTU was placed at the 3′ end of the binary construct to test whether the order of the PTU cassettes could reduce fragmentation and rearrangements in isolated transgenic events. SzPUFA OrfA is a large open reading frame (˜8,700 b.p.) containing nine tandem acyl carrier protein repeats. In the first series of completed constructs, the SzPUFA OrfA PTU was positioned to be integrated first into the plant chromosome. The SzPUFA OrfA PTU was subsequently followed by the remaining PUFA synthesis-related gene PTUs as they decreased in molecular size. Molecular analysis of the SzPUFA OrfA coding region indicated that some transgenic canola and Arabidopsis thaliana events contained fragmented insertions. Alternative Construct Designs are described, wherein the order of the PUFA synthase PTUs has been changed to the following configuration; hSzThPUFA OrfC PTU, SzPUFA OrfB PTU, NoHetI PTU, SzPUFA OrfA PTU, and PAT PTU. Changing the location of the SzPUFA OrfA PTU on the binary construct is completed to reduce fragmentation and rearrangement in isolated transgenic events.

### Example 9.7

### Construction of pDAB9151

[0356] The pDAB9151 plasmid (FIG. 31; SEQ ID NO:57) was constructed using a multi-site Gateway L-R recombination reaction. pDAB9151 contains three PUFA synthase PTUs, one phosphopantetheinyl transferase PTU and a phosphinothricin acetyl transferase PTU. Specifically, the first PUFA synthase PTU contains the PvDlec2 promoter v2, 2S 5′ UTR, SzPUFA OrfB v3 and At2S SSP terminator v1. The second PUFA synthase PTU contains the PvDlec2 promoter v2, 2S 5′ UTR, hSzThPUFA OrfC v3 and At2S SSP terminator v1. The phosphopantetheinyl transferase PTU contains the PvDlec2 promoter v2, 2S 5′ UTR, NoHetI v3 and At2S SSP terminator v1. The final PUFA synthase PTU contains the PvDlec2 promoter v2, 2S 5′ UTR, SzPUFA OrfA v3 and At2S SSP terminator v1.

[0357] Plasmids pDAB9148, pDAB7335, pDAB9149, pDAB9150 and pDAB7333 were recombined to Run pDAB9151. Specifically, the four PTUs described above were placed in a head-to-tail orientation within the T-strand DNA border regions of the plant transformation binary pDAB7333. The order of the genes is: hSzThPUFA OrfC v3, SzPUFA OrfB v3, NoHetI v3, SzPUFA OrfA v3. pDAB7333 also contains the phosphinothricin acetyl transferase PTU: CsVMV promoter v2, PAT v5, AtuORF1 3′ UTR v4 in addition to other regulatory elements such as Overdrive and T-strand border sequences (T-DNA Border A and T-DNA Border B). Recombinant plasmids containing the five PTUs were then isolated and tested for incorporation of the five PTUs with restriction enzyme digestion and DNA sequencing.

### Change the Transcriptional Direction of the Binary Construct PTUs to Introduce Construct Diversity

[0358] An alternative construct design includes changing the order of PUFA synthase PTUs and the transcriptional direction of the gene expression cassettes. In the first series of completed constructs, each gene expression cassette was positioned in the same direction (“head to tail,” wherein the promoter of one gene expression cassette is located adjacent to the 3′ UTR of a second gene expression cassette). The following constructs describe a strategy wherein, gene expression cassettes are positioned in different directions, and utilize alternative promoters. In these examples, the gene expression cassette is located in trans to a second gene expression cassette such that the promoters of both gene expression cassettes are engineered adjacent to one another. This configuration is described as a “head-to-head” configuration. Other configurations are described in the examples, wherein one gene expression cassettes is located in trans to a second gene expression cassette such that the 3′ UTRs of both gene expression cassettes are engineered adjacent to one another. This configuration is described as a “tail-to-tail” configuration. To mitigate potential read-through of such a design, the bidirectional Orf 23/24 terminator has been placed between these two PTUs. These configurations are proposed to increase expression of the transgenes, thereby resulting in higher concentrations and content of LC-PUFA and DHA fatty acid.

### Example 9.8

### Construction of pDAB108207

[0359] The pDAB108207 plasmid (FIG. 32; SEQ ID NO:58) was constructed using a multi-site Gateway L-R recombination reaction. pDAB108207 contains three PUFA synthase PTUs, one phosphopantetheinyl transferase PTU and a phosphinothricin acetyl transferase PTU. Specifically, the first PUFA synthase PTU contains the PvDlec2 promoter v2, 2S 5′ UTR, SzPUFA OrfA v3 and At2S SSP terminator v1. The phosphopantetheinyl transferase PTU contains the PvPhas promoter v6, PvPhas 5′ UTR, NoHetI v3, PvPhas 3′ UTR v1 and PvPhas 3′ MAR v2 (unannotated on the plasmid map). The second PUFA synthase PTU contains the PvDlec2 promoter v2, 2S 5′ UTR, hSzThPUFA OrfC v3, At2S SSP terminator v1 and AtuORF23 3′ UTR v1. The third PUFA synthase PTU contains the PvPhas promoter v6, PvPhas 5′ UTR, SzPUFA OrfB v3, PvPhas 3′ UTR and PvPhas 3′ MAR v2 (unannotated on the plasmid map) and AtuORF23 3′ UTR v1.

[0360] Plasmids pDAB7334, pDAB101489, pDAB108205, pDAB108206 and pDAB7333 were recombined to form pDAB108207. Specifically, the SzPUFA OrfA v3 and NoHetI v3 are placed in a tail-to-tail orientation; NoHetI v3 and hSzThPUFA OrfC v3 are placed in a head-to-head orientation; hSzThPUFA OrfC v3 and SzPUFA OrfB are placed in a tail-to-tail orientation within the T-strand DNA border regions of the plant transformation binary pDAB7333. The order of the genes is: SzPUFA OrfA v3, NoHetI v3, hSzThPUFA OrfC v3, SzPUFA OrfB v3. pDAB7333 also contains the phosphinothricin acetyl transferase PTU: CsVMV promoter v2, PAT v5, AtuORF1 3′ UTR v4 in addition to other regulatory elements such as Overdrive and T-strand border sequences (T-DNA Border A and T-DNA Border B). Recombinant plasmids containing the five PTUs were then isolated and tested for incorporation of the five PTUs with restriction enzyme digestion and DNA sequencing.

### Example 9.9

### Construction of pDAB108208

[0361] The pDAB108208 plasmid (FIG. 33; SEQ ID NO:59) was constructed using a multi-site Gateway L-R recombination reaction. pDAB108208 contains three PUFA synthase PTUs, one phosphopantetheinyl transferase PTU and a phosphinothricin acetyl transferase PTU. Specifically, the first PUFA synthase PTU contains the PvDlec2 promoter v2, 2S 5′ UTR, SzPUFA OrfA v3 and At2S SSP terminator v1. The phosphopantetheinyl transferase PTU contains the PvPhas promoter v4, PvPhas 5′ UTR, NoHetI v3 and AtuORF23 3′ UTR v1. The second PUFA synthase PTU contains the PvDlec2 promoter v2, 2S 5′ UTR, hSzThPUFA OrfC v3 and At2S SSP terminator v1. The third PUFA synthase PTU contains the PvPhas promoter v5, PvPhas 5′ UTR, SzPUFA OrfB v3, PvPhas 3′ UTR, PvPhas 3′ MAR v2 (unannotated on the plasmid map), and AtuORF23 3′ UTR v1.

[0362] Plasmids pDAB108200, pDAB101490, pDAB108201, pDAB108202 and pDAB7333 were recombined to form pDAB108208. Specifically, the SzPUFA OrfA v3 and NoHetI v3 are placed in a head-to-head orientation; NoHetI v3 and hSzThPUFA OrfC v3 are placed in a tail-to-tail orientation; hSzThPUFA OrfC v3 and SzPUFA OrfB are placed in a head-to-head orientation within the T-strand DNA border regions of the plant transformation binary pDAB7333. The order of the genes is: SzPUFA OrfA v3, NoHetI v3, hSzThPUFA OrfC v3, SzPUFA OrfB v3. pDAB7333 also contains the phosphinothricin acetyl transferase PTU: CsVMV promoter v2, PAT v5, AtuORF1 3′ UTR v4 in addition to other regulatory elements such as Overdrive and T-strand border sequences (T-DNA Border A and T-DNA Border B). Recombinant plasmids containing the five PTUs were then isolated and tested for incorporation of the five PTUs with restriction enzyme digestion and DNA sequencing.

### Example 9.10

### Construction of pDAB108209

[0363] The pDAB108209 plasmid (FIG. 34; SEQ ID NO:60) was constructed using a multi-site Gateway L-R recombination reaction. pDAB108209 contains three PUFA synthase PTUs, one phosphopantetheinyl transferase PTU and a phosphinothricin acetyl transferase PTU. Specifically, the first PUFA synthase PTU contains the PvDlec2 promoter v2, 2S 5′ UTR, SzPUFA OrfA v3 and At2S SSP terminator v1. The phosphopantetheinyl transferase PTU contains the PvPhas promoter v4, PvPhas 5′ UTR, NoHetI v3 and AtuORF23 3′ UTR v1. The second PUFA synthase PTU contains the PvDlec2 promoter v2, 2S 5′ UTR, hSzThPUFA OrfC v3 and At2S SSP terminator v1. The third PUFA synthase PTU contains the PvPhas promoter v5, PvPhas 5′ UTR, SzPUFA OrfB v3, PvPhas 3′ UTR and PvPhas 3′ MAR v2 (unannotated on the plasmid map), and random DNA spacer.

[0364] Plasmids pDAB108200, pDAB108204, pDAB108201, pDAB108202 and pDAB7333 were recombined to faun pDAB108209. Specifically, the SzPUFA OrfA v3 and NoHetI v3 are placed in a head-to-head orientation; NoHetI v3 and hSzThPUFA OrfC v3 are placed in a tail-to-tail orientation; hSzThPUFA OrfC v3 and SzPUFA OrfB are placed in a head-to-head orientation within the T-strand DNA border regions of the plant transformation binary pDAB7333. The order of the genes is: SzPUFA OrfA v3, NoHetI v3, hSzThPUFA OrfC v3, SzPUFA OrfB v3. pDAB7333 also contains the phosphinothricin acetyl transferase PTU: CsVMV promoter v2, PAT v5, AtuORF1 3′ UTR v4 in addition to other regulatory elements such as Overdrive and T-strand border sequences (T-DNA Border A and T-DNA Border B). Recombinant plasmids containing the five PTUs were then isolated and tested for incorporation of the five PTUs with restriction enzyme digestion and DNA sequencing.

### Doubling 3′ UTRs and Including Spacer DNA to Minimize Transcriptional Interference.

[0365] Transcriptional interference can occur when multiple genes are stacked in a series thereby resulting in reduced expression of the downstream genes. This phenomenon results from transcriptional read-through of the 3′ UTR and terminator into the next promoter-transcription unit. Alternative construct designs consisting of two strategies to minimize transcriptional interference and transcriptional interference are described. The first strategy deploys the use of two terminator/3′ UTRs, which are stacked between individual DHA gene expression cassettes to limit read-through into the next gene expression cassette. The second strategy inserts about one-thousand base pairs of spacer DNA between gene expression cassettes, thereby minimizing transcriptional interference.

### Example 9.11

### Construction of pDAB108207

[0366] The pDAB108207 plasmid (FIG. 32; SEQ ID NO:58) was constructed using a multi-site Gateway L-R recombination reaction. pDAB108207 contains three PUFA synthase PTUs, one phosphopantetheinyl transferase PTU and a phosphinothricin acetyl transferase PTU. Specifically, the first PUFA synthase PTU contains the PvDlec2 promoter v2, 2S 5′ UTR, SzPUFA OrfA v3 and At2S SSP terminator v1. The second PUFA synthase PTU contains the PvPhas promoter v3, PvPhas 5′ UTR, SzPUFA OrfB v3, PvPhas 3′ UTR, PvPhas 3′ MAR v2 (unannotated on the plasmid map), and AtuORF23 3′ UTR v1. The third PUFA synthase PTU contains the PvDlec2 promoter v2, 2S 5′ UTR, hSzThPUFA OrfC v3, At2S SSP terminator v1 and AtuORF23 3′ UTR v1. The phosphopantetheinyl transferase PTU contains the PvPhas promoter v6, PvPhas 5′ UTR, NoHetI v3, PvPhas 3′ UTR v1 and PvPhas 3′ MAR v2 (unannotated on the plasmid map).

[0367] Plasmids pDAB7334, pDAB101489, pDAB108205, pDAB108206 and pDAB7333 were recombined to form pDAB108207. Specifically, the SzPUFA OrfA v3 and NoHetI v3 are placed in a tail-to-tail orientation and an AtuORF23 3′ UTR is placed between the two PTUs; NoHetI v3 and hSzThPUFA OrfC v3 are placed in a head-to-head orientation; hSzThPUFA OrfC v3 and SzPUFA OrfB are placed in a head-to-tail orientation and an AtuORF23 3′ UTR is placed between the two PTUs within the T-strand DNA border regions of the plant transformation binary pDAB7333. The order of the genes is: SzPUFA OrfA v3, NoHetI v3, hSzThPUFA OrfC v3, SzPUFA OrfB v3. pDAB7333 also contains the phosphinothricin acetyl transferase PTU: CsVMV promoter v2, PAT v5, AtuORF1 3′ UTR v4 in addition to other regulatory elements such as Overdrive and T-strand border sequences (T-DNA Border A and T-DNA Border B). Recombinant plasmids containing the five PTUs were then isolated and tested for incorporation of the five PTUs with restriction enzyme digestion and DNA sequencing.

### Example 9.12

### Construction of pDAB108208

[0368] The pDAB108208 plasmid (FIG. 33; SEQ ID NO:59) was constructed using a multi-site Gateway L-R recombination reaction. pDAB108208 contains three PUFA synthase PTUs, one acyl-CoA synthetase PTU, one phosphopantetheinyl transferase PTU and a phosphinothricin acetyl transferase PTU. Specifically, the first PUFA synthase PTU contains the PvDlec2 promoter v2, 2S 5′ UTR, SzPUFA OrfA v3 and At2S SSP terminator v1. The second PUFA synthase PTU contains the PvPhas promoter v5, PvPhas 5′ UTR, SzPUFA OrfB v3, PvPhas 3′ UTR, PvPhas 3′ MAR v2 (unannotated on the plasmid map) and AtuORF23 3′ UTR v1. The third PUPA synthase PTU contains the PvDlec2 promoter v2, 2S 5′ UTR, hSzThPUFA OrfC v3 and At2S SSP terminator v1. The phosphopantetheinyl transferase PTU contains the PvPhas promoter v4, PvPhas 5′ UTR, NoHetI v3 and AtuORF23 3′ UTR v1.

[0369] Plasmids pDAB108200, pDAB101490, pDAB108201, pDAB108202 and pDAB7333 were recombined to form pDAB108208. Specifically, the SzPUFA OrfA v3 and NoHetI v3 are placed in a head-to-head orientation; NoHetI v3 and hSzThPUFA OrfC v3 are placed in a tail-to-tail orientation and an AtuORF23 3′ UTR is placed between the two PTUs; hSzThPUFA OrfC v3 and SzPUFA OrfB are placed in a head-to-head orientation within the T-strand DNA border regions of the plant transformation binary pDAB7333. The order of the genes is: SzPUFA OrfA v3, NoHetI v3, hSzThPUFA OrfC v3, SzPUFA OrfB v3. pDAB7333 also contains the phosphinothricin acetyl transferase PTU: CsVMV promoter v2, PAT v5, AtuORF1 3′ UTR v4 in addition to other regulatory elements such as Overdrive and T-strand border sequences (T-DNA Border A and T-DNA Border B). Recombinant plasmids containing the five PTUs were then isolated and tested for incorporation of the five PTUs with restriction enzyme digestion and DNA sequencing.

### Example 9.13

### Construction of pDAB108209

[0370] The pDAB108209 plasmid (FIG. 34; SEQ ID NO:60) was constructed using a multi-site Gateway L-R recombination reaction. pDAB108209 contains three PUFA synthase PTUs, one acyl-CoA synthetase PTU, one phosphopantetheinyl transferase PTU and a phosphinothricin acetyl transferase PTU. Specifically, the first PUFA synthase PTU contains the PvDlec2 promoter v2, 2S 5′ UTR, SzPUFA OrfA v3 and At2S SSP terminator v1. The second PUFA synthase PTU contains the PvPhas promoter v5, PvPhas 5′ UTR, SzPUFA OrfB v3, PvPhas 3′ UTR, PvPhas 3′ MAR v2 (unannotated on the plasmid map), and random DNA spacer. The third PUFA synthase PTU contains the PvDlec2 promoter v2, 2S 5′ UTR, hSzThPUFA OrfC v3 and At2S SSP terminator v1. The phosphopantetheinyl transferase PTU contains the PvPhas promoter v4, PvPhas 5′ UTR, NoHetI v3 and AtuORF23 3′ UTR v1.

[0371] Plasmids pDAB108200, pDAB108204, pDAB108201, pDAB108202 and pDAB7333 were recombined to form pDAB108209. Specifically, the SzPUFA OrfA v3 and NoHetI v3 are placed in a head-to-head orientation; NoHetI v3 and hSzThPUFA OrfC v3 are placed in a tail-to-tail orientation and a one-thousand base pair spacer is placed between the two PTUs; hSzThPUFA OrfC v3 and SzPUFA OrfB are placed in a head-to-head orientation within the T-strand DNA border regions of the plant transformation binary pDAB7333. The order of the genes is: SzPUFA OrfA v3, NoHetI v3, hSzThPUFA OrfC v3, SzPUFA OrfB v3. pDAB7333 also contains the phosphinothricin acetyl transferase PTU: CsVMV promoter v2, PAT v5, AtuORF1 3′ UTR v4 in addition to other regulatory elements such as Overdrive and T-strand border sequences (T-DNA Border A and T-DNA Border B). Recombinant plasmids containing the five PTUs were then isolated and tested for incorporation of the five PTUs with restriction enzyme digestion and DNA sequencing.

### Using Alternative 3′ UTR-Terminator to Limit Transcriptional Read-Through.

[0372] The Agrobacterium ORF 23 3′ UTR-terminator is primarily used to terminate transcription in many of the above constructs. It was recently shown the ZmLipase 3′ UTR-terminator is more effective in terminating transcriptional read-through in Arabidopsis thaliana. As such, one version of constructs utilizes the ZmLipase 3′ UTR-terminator in combination with the PvDlec2 promoter to test if this 3′ UTR can reduce transcriptional read-through of upstream genes, thereby reducing transcriptional interference.

### Example 9.14

### Construction of pDAB9159

[0373] The pDAB9159 plasmid (FIG. 35; SEQ ID NO:61) was constructed using a multi-site Gateway L-R recombination reaction. pDAB9159 contains three PUFA synthase PTUs, one phosphopantetheinyl transferase PTU and a phosphinothricin acetyl transferase PTU. Specifically, the first PUFA synthase PTU contains the PvDlec2 promoter v2, 2S 5′ UTR, SzPUFA OrfA v3 and ZmLip 3′ UTR v1. The second PUFA synthase PTU contains the PvPhas promoter v3, PvPhas 5′ UTR, SzPUFA OrfB v3 and ZmLip 3′ UTR v1. The third PUFA synthase PTU contains the PvDlec2 promoter v2, 2S 5′ UTR, hSzThPUFA OrfC v3 and ZmLip 3′ UTR v1. The phosphopantetheinyl transferase PTU contains the PvPhas promoter v3, PvPhas 5′ UTR, NoHetI v3 and ZmLip 3′ UTR v1.

[0374] Plasmids pDAB9152, pDAB9153, pDAB9154, pDAB9155 and pDAB7333 were recombined to form pDAB9159. Specifically, the four PTUs described above were placed in a head-to-tail orientation within the T-strand DNA border regions of the plant transformation binary pDAB7333. The order of the genes is: SzPUFA OrfA v3, SzPUFA OrfB v3, hSzThPUFA OrfC v3, NoHetI v3. pDAB7333 also contains the phosphinothricin acetyl transferase PTU: CsVMV promoter v2, PAT v5, AtuORF1 3′ UTR v4 in addition to other regulatory elements such as Overdrive and T-strand border sequences (T-DNA Border A and T-DNA Border B). Recombinant plasmids containing the five PTUs were then isolated and tested for incorporation of the five PTUs with restriction enzyme digestion and DNA sequencing.

### Example 9.15

### Construction of pDAB9147

[0375] The pDAB9147 plasmid (FIG. 36; SEQ ID NO:62) was constructed using a multi-site Gateway L-R recombination reaction. pDAB9147 contains three PUFA synthase PTUs, one phosphopantetheinyl transferase PTU and a phosphinothricin acetyl transferase PTU. Specifically, the first PUFA synthase PTU contains the PvDlec2 promoter v2, 2S 5′ UTR, SzPUFA OrfA v3, At2S SSP terminator v1 and ZmLip 3′ UTR v1. The second PUFA synthase PTU contains the PvDlec2 promoter v2, 2S 5′ UTR, SzPUFA OrfB v3 and At2S SSP terminator v1. The third PUFA synthase PTU contains the PvDlec2 promoter v2, 2S 5′ UTR, hSzThPUFA OrfC v3 and At2S SSP terminator v1. The phosphopantetheinyl transferase PTU contains the PvDlec2 promoter v2, 2S 5′ UTR, NoHetI v3 and At2S SSP terminator v1.

[0376] Plasmids pDAB9146, pDAB7335, pDAB7336, pDAB7338 and pDAB7333 were recombined to form pDAB9147. Specifically, the four PTUs described above were placed in a head-to-tail orientation within the T-strand DNA border regions of the plant transformation binary pDAB7333. The order of the genes is: SzPUFA OrfA v3, SzPUFA OrfB v3, hSzThPUFA OrfC v3, NoHetI v3. pDAB7333 also contains the phosphinothricin acetyl transferase PTU: CsVMV promoter v2, PAT v5, AtuORF1 3′ UTR v4 in addition to other regulatory elements such as Overdrive and T-strand border sequences (T-DNA Border A and T-DNA Border B). Recombinant plasmids containing the five PTUs were then isolated and tested for incorporation of the five PTUs with restriction enzyme digestion and DNA sequencing.

### Delivery of DHA Genes on Two Separate T-DNAs.

[0377] An alternative construct design consists of constructing two separate binary vectors, the first vector containing a sub-set of PUFA synthase genes on one T-DNA, and the second binary vector containing the remaining PUFA synthase genes on a second T-DNA. These binary vectors are individually used to transform plants that are sexually crossed, thereby resulting in progeny that contain all of the PUFA synthase gene expression constructs. An alternative method to produce transgenic plants would be to co-transform both binary vectors into soybean tissue, and select or screen for a single plant that contains both T-strands.

### Example 9.16

### Construction of pDAB108224

[0378] The pDAB108224 plasmid (FIG. 37; SEQ ID NO:63) was constructed using a multi-site Gateway L-R recombination reaction. pDAB108224 contains one PUFA synthase PTU, one phosphopantetheinyl transferase PTU and a phosphinothricin acetyl transferase PTU. Specifically, the first PUFA synthase PTU contains the PvDlec2 promoter v2, 2S 5′ UTR, SzPUFA OrfA v3 and At2S SSP terminator v1. The phosphopantetheinyl transferase PTU contains the PvPhas promoter v4, PvPhas 5′ UTR, NoHetI v3 and AtuORF23 3′ UTR v1.

[0379] Plasmids pDAB108216, pDAB108221 and pDAB7333 were recombined to form pDAB108224. Specifically, the SzPUFA OrfA v3 and NoHetI v3 are placed in a head-to-head orientation within the T-strand DNA border regions of the plant transformation binary pDAB7333. The order of the genes is: SzPUFA OrfA v3, NoHetI v3. pDAB7333 also contains the phosphinothricin acetyl transferase PTU: CsVMV promoter v2, PAT v5, AtuORF1 3′ UTR v4 in addition to other regulatory elements such as Overdrive and T-strand border sequences (T-DNA Border A and T-DNA Border B). Recombinant plasmids containing the five PTUs were then isolated and tested for incorporation of the three PTUs with restriction enzyme digestion and DNA sequencing.

### Example 9.17

### Construction of pDAB108225

[0380] The pDAB108225 plasmid (FIG. 38; SEQ ID NO:64) was constructed using a multi-site Gateway L-R recombination reaction. pDAB108225 contains two PUFA synthase PTUs and a phosphinothricin acetyl transferase PTU. Specifically, the first PUFA synthase PTU contains the PvDlec2 promoter v2, 2S 5′ UTR, SzPUFA OrfB v3 and At2S SSP terminator v1. The second PUFA synthase PTU contains the PvPhas promoter v4, SzPUFA OrfB v3 and Atu ORF23 3′ UTR v1.

[0381] Plasmids pDAB108217, pDAB108222 and pDAB7333 were recombined to form pDAB108225. Specifically, the SzPUFA (MB v3 and hSzThPUFA OrfC v3 are placed in a head-to-head orientation within the T-strand DNA border regions of the plant transformation binary pDAB7333. The order of the genes is: SzPUFA OrfB v3, hSzThPUFA OrfC v3. pDAB7333 also contains the phosphinothricin acetyl transferase PTU: CsVMV promoter v2, PAT v5, AtuORF1 3′ UTR v4 in addition to other regulatory elements such as Overdrive and T-strand border sequences (T-DNA Border A and T-DNA Border B). Recombinant plasmids containing the five PTUs were then isolated and tested for incorporation of the three PTUs with restriction enzyme digestion and DNA sequencing.

Soybean Transformation with Constructs Containing Alternative Designs

[0382] These plasmids are used to stably transform soybean plants using the protocols described above. Transgenic soybean plants are isolated and molecularly characterized. The use of alternative constructs result in soybean plants that contain greater amounts of DHA and LC-PUFAs. The resulting LC-PUFA accumulation is determined and soybean plants that produce 0.01% to 15% DHA or 0.01% to 15% LC-PUFA are identified.

### Example 10

### Alternative Construct Designs Used for Transformation of Arabidopsis thaliana and Subsequent Production of LC-PUFA and DHA

[0383] Arabidopsis thaliana plants were transformed with Agrobacterium tumefaciens strains containing the pDAB101493, pDAB7362, pDAB7369, pDAB101412, or pDAB7380 binary vectors. A floral dipping transformation protocol described by Clough and Bent (1998) was used for the transformation. Clough and Bent, “Floral dip: a simplified method for agrobacterium-mediated transformation of Arabidopsis thalia,” Plant J., 16:735-743, 1998. Transformed Arabidopsis plants were obtained and molecular confirmation of the transgene presence was completed. T₁ plants from the transgenic Arabidopsis events were grown to maturity in the greenhouse. These plants were self-fertilized and the resulting T₂ seed harvested at maturity, T₂ seeds (10 mg) were analyzed via FAMEs GC-FID to determine the LC-PUFA and DHA content in the T₂ Arabidopsis seed. The tissue was analyzed via the FAMEs GC-FID method as described in the previous examples. T₂ seeds from a T₁ plant of the Arabidopsis plants contained from 0% to 0.95% DHA and 0% to 1.50% total LC-PUFA. The LC-PUFA and DHA content of the T₂ seed from individual T₁ plants is shown in FIG. 39.

### Example 11

### Co-Expression of DGAT2 or ACCase with the Algal PUFA Synthase Gene Suite within Soybean

[0384] Oil content within soybean plants is further modified by transformation of chimeric DNA molecules that encode and express an acetyl CoA carboxylase (ACCase) or a type 2 diacylglycerol acyltransferase (DGAT2). These genes are co-expressed with the algal PUFA synthase genes described above, either through breeding soybean plants containing the ACCase or DGAT2 expression cassette with soybean plants containing the PUFA synthase genes; or by transforming soybean plants with a gene stack containing the ACCase or DGAT2 and the PUFA synthase genes. Regulatory elements necessary for expression of an ACCase or DGAT2 coding sequence can include those described above. Additional regulatory elements expression sequences known in the art may also be used. The ACCase and DGAT2 expression cassettes are transformed into soybean using transformation protocols described above. Transformation may occur as molecular stacks of the ACCase or DGAT2 expression cassette combined with the PUFA synthase OrfA, PUFA synthase OrfB, PUFA synthase OrfC, acyl-CoA synthetase and 4′ phosphopantetheinyl transferase HetI expression cassettes; or as independent ACCase or DGAT2 expression cassettes linked to a selectable marker and then subsequently crossed with soybean plants that contain the PUFA synthase OrfA, PUFA synthase OrfB, PUFA synthase OrfC, acyl-CoA synthetase and 4′ phosphopantetheinyl transferase HetI expression cassettes. Positive transformants are isolated and molecularly characterized. Soybean plants are identified that contain increased accumulation of LC-PUFAs in the plant, the seed of the plant, or plant oil concentrations compared to untransformed control soybean plants. Such increases can range from a 1.2 to a 20-fold increase.

[0385] The over-expression of ACCase in the cytoplasm may produce higher levels of malonyl-CoA, Soybean plants or seed containing increased levels of cytoplasmic malonyl-CoA may produce subsequently higher levels of the long-chain polyunsaturated fatty acid (LC-PUFA) when the algal PUFA synthase genes are present and expressed. DGAT2 genes that are expressed within soybean plants may be capable of preferentially incorporating significant amounts of docosahexaenoic acid (DHA) and eicosapentaenoic acid (EPA) into triacylglycerol. DGAT2 genes with substrate preference toward LC-PUFAs (see, e.g., PCT International Publication WO 2009/085169 A2) may increase incorporation of these fatty acids into triacylglycerol (TAG). Such DGAT genes are useful for directing the incorporation of LC-PUFA, particularly DHA, into TAG and for increasing the production of TAG in plants and other organisms.

### Example 12

### Production of DHA in Arabidopsis Seeds Transformed with Alternative Construct Designs for Expression of PUFA Synthase Genes

[0386] Arabidopsis T₁ events transformed with Agrobacterium tumefaciens harboring plasmids encoding PUFA synthase genes and HetI (and in some cases SzACS-2) under the control of various plant expression elements were generated using the floral dip method essentially as described in Clough and Bent (Plant J., 1998 16(6):735-43). The resulting T₁ seed was harvested and sown. Transformed T₁ plants were selected by spraying with phosphinothricin to select for those plants containing a functional PAT gene as a selectable marker. Leaf tissue from the surviving T₁ plants was sampled and analyzed by quantitative PCR reactions specific for the PAT gene to identify those plants containing a single copy of the selectable marker (and associated transgenes). These plants were grown to maturity, the T₂ seed harvested and analyzed for LC-PUFA content (as % of total extractable FAMEs). A summary of data from the events generated with various constructs encoding PUFA synthase genes is shown in Table 12.

TABLE 12
Arabidopsis events containing a single copy of the PAT transgene
producing LC-PUFA in T₂ seeds and the levels of DHA and EPA for each event, shown as a
percentage of total oil.

| | | # of | # of events | | | | | |
|---|---|---|---|---|---|---|---|---|
| | # of | events | with | Average | Maximum | Maximum | Maximum | Average |
| | events | producing | LC-PUFA | LC-PUFA | LC-PUFA | DHA | EPA | n-3/PUFA |
| Construct | generated | LC-PUFA | >1%¹ | content² | content | content³ | content⁴ | ratio⁵ |
| pDAB9167 | 30 | 9 (30%) | 0 | 0.06 | 0.24 | 0.17 | 0 | 67% |
| pDAB101477 | 11 | 2 (18%) | 0 | 0.07 | 0.49 | 0.29 | 0 | 64% |
| pDAB101412 | 63 | 33 (52%) | 0 | 0.17 | 0.91 | 0.40 | 0.07 | 68% |
| pDAB7380 | 45 | 23 (51%) | 0 | 0.23 | 0.79 | 0.47 | 0.12 | 69% |
| pDAB7733 | 23 | 13 (57%) | 0 | 0.24 | 1.07 | 0.69 | 0.07 | 61% |
| pDAB101493 | 25 | 15 (60%) | 0 | 0.26 | 0.88 | 0.52 | 0.13 | 75% |
| pDAB100518 | 71 | 39 (71%) | 0 | 0.27 | 0.96 | 0.64 | 0.07 | 70% |
| pDAB7362 | 126 | 45 (36%) | 10 (8%) | 0.28 | 1.73 | 1.02 | 0.26 | 64% |
| pDAB9151 | 35 | 15 (43%) | 3 (9%) | 0.29 | 1.39 | 0.84 | 0.11 | 74% |
| pDAB9147 | 40 | 19 (48%) | 3 (8%) | 0.36 | 1.62 | 0.89 | 0.10 | 70% |
| pDAB9159 | 46 | 32 (70%) | 0 | 0.43 | 1.07 | 0.68 | 0.13 | 72% |
| pDAB109509 | 32 | 21 (66%) | 1 (3%) | 0.44 | 1.14 | 0.79 | 0.17 | 67% |
| pDAB7734 | 45 | 27 (60%) | 8 (18%) | 0.49 | 1.62 | 1.00 | 0.13 | 76% |
| pDAB7369 | 42 | 26 (62%) | 5 (12%) | 0.50 | 1.47 | 0.88 | 0.11 | 66% |
| pDAB108209 | 46 | 36 (78%) | 2 (4%) | 0.62 | 1.61 | 1.01 | 0.29 | 70% |
| pDAB109508 | 29 | 20 (69%) | 7 (24%) | 0.68 | 1.72 | 1.02 | 0.13 | 64% |
| pDAB108208 | 46 | 33 (72%) | 21 (46%) | 0.71 | 1.33 | 0.89 | 0.18 | 73% |
| pDAB109507 | 30 | 23 (77%) | 10 (33%) | 0.77 | 2.03 | 1.45 | 0.05 | 72% |
| pDAB108207 | 47 | 35 (74%) | 16 (34%) | 0.86 | 1.82 | 0.99 | 0.16 | 64% |

¹Number of events with LC-PUFA content >1% of total seed FAMEs with %-age of total events in parentheses.
²Average total LC-PUFA content (DHA(n-3) + EPA(n-3) + DPA (n-6)) of all T2 seed samples as % of total seed FAMEs
³Maximum DHA content of all T₂ seed samples analyzed as % of total FAMEs
⁴Maximum EPA content of all T₂ seed samples analyzed as % of total FAMEs
⁵Average n-3 LC-PUFA (DHA + EPA)/Total LC-PUFA content across all LC-PUFA-producing events (as %)

[0387] These data show that certain construct configurations and promoter combinations generate a higher proportion of events containing LC-PUFA in the T₂ seed (77% of all single copy events for pDAB109507 produced DHA, and 86% of all single copy events for pDAB108207 produced DHA). Also certain constructs generate a higher proportion of events producing >1% LC-PUFA content (33% of all single copy events for pDAB109507, and 34% of all single copy events for pDAB108207). The maximum LC-PUFA content of the T₂ seed from the various events ranged from 0.24%-2.03% for the different constructs. Likewise, certain constructs produce higher levels of omega-3 LC-PUFAs. The maximum DHA content ranged from 0.17%-1.45% and the maximum EPA content ranged from 0%-0.26% across all the constructs and events generated. These data indicate that the alteration of the construct design where promoter configurations were changed resulted in transgenic plants that exhibit increased LC-PUFA, as compared to transgenic plants that were transformed with pDAB7362. As such, these constructs in which the construct design was altered are desirable for crop transformations.

[0388] T₂ seed from high LC-PUFA producing events was planted and the leaf tissue from the growing plants was sampled using quantitative PCR to assay the PAT gene and other transgenes. Plants containing two copies of the transgenes (i.e., homozygotes) were identified and grown to maturity. The resulting T₃ seed was harvested and analyzed for LC-PUFA content. Some constructs such as pDAB7362 and pDAB109509, which contained repeated promoter/3′ UTR expression elements, showed poor stability of the LC-PUFA trait in the subsequent T₃ seed generation. However, some events transformed with different construct configurations and/or diversified expression elements (e.g., pDAB108207, 109508 and 7734) produced significantly improved stability of the LC-PUFA trait into the T₃ seed generation, as shown in Table 13. These data indicate that certain constructs can maintain stability of the DHA trait in subsequent generations and that such constructs are preferred for crop transformations.

TABLE 13
LC-PUFA analysis of T₃ seed progeny from selected transgenic
Arabidopsis DHA-producing T₂ lines

| | | Parent | Parent | No. of | Average | Range of | Average | Range of T₃ |
|---|---|---|---|---|---|---|---|---|
| | | T₂ seed | T₂ seed | homozygous | T₃ seed | T₃ seed | T₃ seed | seed |
| | | DHA | LC-PUFA | progeny | DHA | DHA | LC-PUFA | LC-PUFA |
| Construct | Event ID | content | content | analyzed | content¹ | content | content | content |
| pDAB7362 | 5217[12]-202 | 0.66 | 1.53 | 14 | 0.03 | 0-0.10 | 0.17 | 0-0.46 |
| pDAB7362 | 5217[12]-231 | 0.89 | 1.50 | 20 | 0.04 | 0-0.28 | 0.08 | 0-0.48 |
| pDAB7362 | 5217[12]-219 | 0.77 | 1.35 | 19 | 0.03 | 0-0.17 | 0.05 | 0-0.26 |
| pDAB109509 | 109509[1]- | 0.79 | 1.14 | 10 | 0.13 | 0-0.31 | 0.20 | 0-0.42 |
| | 025 | | | | | | | |
| pDAB109509 | 109509[1]- | 0.61 | 1.00 | 10 | 0.15 | 0.06-0.30 | 0.21 | 0.09-0.42 |
| | 037 | | | | | | | |
| pDAB109509 | 109509[2]- | 0.73 | 1.03 | 10 | 0.09 | 0-0.36 | 0.12 | 0-0.47 |
| | 102 | | | | | | | |
| pDAB108207 | 108207[1]- | 0.93 | 1.57 | 10 | 0.89 | 0.66-1.09 | 1.43 | 0.99-1.84 |
| | 047 | | | | | | | |
| pDAB108207 | 108207[1]- | 0.99 | 1.77 | 5 | 1.08 | 0.99-1.27 | 2.05 | 1.83-2.36 |
| | 051 | | | | | | | |
| pDAB108207 | 108207[1]- | 0.97 | 1.68 | 5 | 0.88 | 0.55-1.04 | 1.64 | 1.08-1.9 |
| | 076 | | | | | | | |
| pDAB109508 | 109508[1]- | 1.02 | 1.72 | 10 | 1.25 | 1.16-1.39 | 1.99 | 1.86-2.09 |
| | 028 | | | | | | | |
| pDAB7734 | 6491[1]-138 | 1 | 1.62 | 9 | 1.43 | 0.98-1.83 | 2.17 | 1.45-2.89 |

Total LC-PUFA contents and DHA contents are % of total FAMEs
¹T₃ bulk seed from 5-20 individual homozygous plants was analyzed

[0389] The foregoing description of the invention has been presented for purposes of illustration and description. Furthermore, the description is not intended to limit the invention to the form disclosed herein.

[0390] All of the various aspects, embodiments, and options described herein can be combined in any and all variations.

[0391] All publications, patents, and patent applications mentioned in this specification are herein incorporated by reference to the same extent as if each individual publication, patent, or patent application was specifically and individually indicated to be incorporated by reference.

1-73. (canceled)

74. A method to produce an oil comprising at least one PUFA, comprising recovering an oil from the genetically modified soybean plant, descendant, cell, tissue, seed, or part thereof, comprising:
(i) a nucleic acid molecule comprising a nucleic acid sequence encoding a polyunsaturated fatty acid (PUFA) synthase that produces at least one PUFA; and
(ii) a nucleic acid molecule comprising a sequence encoding a phosphopantetheinyl transferase (PPTase).

75. The method of claim 74, wherein the PUFA synthase is selected from the group consisting of an amino acid sequence that is at least 80% identical to the amino acid sequence of SEQ ID NO:1, the amino acid sequence of SEQ ID NO:1, an amino acid sequence that is at least 80% identical to the amino acid sequence of SEQ ID NO:2, the amino acid sequence of SEQ ID NO:2, an amino acid sequence that is at least 80% identical to the amino acid sequence of SEQ ID NO:3, and the amino acid sequence of SEQ ID NO:3.

76. The method of claim 74, wherein the nucleic acid sequence encoding the PUFA synthase is selected from a group consisting of a nucleic acid sequence at least 80% identical to the nucleic acid sequence of SEQ ID NO:6, the nucleic acid sequence of SEQ ID NO:6, a nucleic acid sequence at least 80% identical to the nucleic acid sequence of SEQ ID NO:7, the nucleic acid sequence of SEQ ID NO:7, a nucleic acid sequence at least 80% identical to the nucleic acid sequence of SEQ ID NO:8, and the nucleic acid sequence of SEQ ID NO:8.

77. The method of claim 74, wherein the PPTase is selected from a group consisting of an amino acid sequence that is at least 80% identical to SEQ ID NO:5, the amino acid sequence of SEQ ID NO:5, a nucleic acid sequence encoding the PPTase that is at least 80% identical to the nucleic acid sequence of SEQ ID NO: 10, and the nucleic acid sequence encoding the PPTase of SEQ ID NO: 10.

78. The method of claim 74, wherein the PUFA is selected from the group consisting of DHA, EPA, and DPA(n-6).

79. A method to produce an oil comprising at least one PUFA, comprising recovering an oil from a seed of the genetically modified soybean plant, descendant, cell, tissue, or part thereof, comprising:
(i) a nucleic acid molecule comprising a nucleic acid sequence encoding a polyunsaturated fatty acid (PUFA) synthase that produces at least one PUFA; and
(ii) a nucleic acid molecule comprising a sequence encoding a phosphopantetheinyl transferase (PPTase).

80. The method of claim 79, wherein the PUFA synthase is selected from the group consisting of an amino acid sequence that is at least 80% identical to the amino acid sequence of SEQ ID NO:1, the amino acid sequence of SEQ ID NO:1, an amino acid sequence that is at least 80% identical to the amino acid sequence of SEQ ID NO:2, the amino acid sequence of SEQ ID NO:2, an amino acid sequence that is at least 80% identical to the amino acid sequence of SEQ ID NO:3, and the amino acid sequence of SEQ ID NO:3.

81. The method of claim 79, wherein the nucleic acid sequence encoding the PUFA synthase is selected from a group consisting of a nucleic acid sequence at least 80% identical to the nucleic acid sequence of SEQ ID NO:6, the nucleic acid sequence of SEQ ID NO:6, a nucleic acid sequence at least 80% identical to the nucleic acid sequence of SEQ ID NO:7, the nucleic acid sequence of SEQ ID NO:7, a nucleic acid sequence at least 80% identical to the nucleic acid sequence of SEQ ID NO:8, and the nucleic acid sequence of SEQ ID NO:8.

82. The method of claim 79, wherein the PPTase is selected from a group consisting of an amino acid sequence that is at least 80% identical to SEQ ID NO:5, the amino acid sequence of SEQ ID NO:5, a nucleic acid sequence encoding the PPTase that is at least 80% identical to the nucleic acid sequence of SEQ ID NO: 10, and the nucleic acid sequence encoding the PPTase of SEQ ID NO: 10.

83. A method to produce an oil comprising at least one PUFA, comprising growing the genetically modified soybean plant, descendant, cell, tissue, seed, or part thereof, comprising:
(i) a nucleic acid molecule comprising a nucleic acid sequence encoding a polyunsaturated fatty acid (PUFA) synthase that produces at least one PUFA; and
(ii) a nucleic acid molecule comprising a sequence encoding a phosphopantetheinyl transferase (PPTase).

84. The method of claim 83, wherein the PUFA is selected from the group consisting of DHA, EPA, and DPA(n-6).

85. A method to produce at least one PUFA in a seed oil, comprising recovering oil from a seed of the genetically modified soybean plant, descendant, cell, tissue, or part thereof, comprising:
(i) a nucleic acid molecule comprising a nucleic acid sequence encoding a polyunsaturated fatty acid (PUFA) synthase that produces at least one PUFA; and
(ii) a nucleic acid molecule comprising a sequence encoding a phosphopantetheinyl transferase (PPTase).

86. The method of claim 85, wherein the PUFA is selected from the group consisting of DHA, EPA, and DPA(n-6).

87. A method to produce at least one PUFA in a seed oil, comprising growing the genetically modified soybean plant, descendant, cell, tissue, seed, or part thereof, comprising:
(i) a nucleic acid molecule comprising a nucleic acid sequence encoding a polyunsaturated fatty acid (PUFA) synthase that produces at least one PUFA; and
(ii) a nucleic acid molecule comprising a sequence encoding a phosphopantetheinyl transferase (PPTase).

88. The method of claim 87, wherein the PUFA is selected from the group consisting of DHA, EPA, and DPA(n-6).

89. A method to provide a supplement or therapeutic product containing at least one PUFA to an individual, comprising:
providing to the individual the genetically modified soybean plant, descendant, cell, tissue, seed, or part thereof that comprises:
(i) a nucleic acid molecule comprising a nucleic acid sequence encoding a polyunsaturated fatty acid (PUFA) synthase that produces at least one PUFA; and
(ii) a nucleic acid molecule comprising a sequence encoding: a phosphopantetheinyl transferase (PPTase); the oil obtained from the genetically modified soybean plant, descendant, cell, tissue, seed, or part thereof the seed obtained from the genetically modified soybean plant, descendant, cell, tissue, seed, or part thereof the food product of an oil or a seed obtained from a genetically modified soybean plant, descendant, cell, tissue, or part thereof; the functional food comprising an oil or a seed obtained from the genetically modified soybean plant, descendant, cell, tissue, seed, or part thereof or the pharmaceutical product comprising an oil or a seed obtained from the genetically modified soybean plant, descendant, cell, tissue, seed, or part thereof.

90. The method of claim 89, wherein the PUFA is selected from the group consisting of DHA, EPA, and DPA(n-6).

91. A method to produce the genetically modified soybean plant, descendant, cell, tissue, or part thereof that comprises:
(i) a nucleic acid molecule comprising a nucleic acid sequence encoding a polyunsaturated fatty acid (PUFA) synthase that produces at least one PUFA; and
(ii) a nucleic acid molecule comprising a sequence encoding a phosphopantetheinyl transferase (PPTase)., comprising transforming a soybean plant or plant cell with (i) a nucleic acid molecule comprising a sequence encoding an algal PUFA synthase; and (ii) a nucleic acid molecule comprising a sequence encoding a phosphopantetheinyl transferase (PPTase).

92. The method of claim 91, wherein the PUFA is selected from the group consisting of DHA, EPA, and DPA(n-6).

93. The method of claim 91, further comprising transforming the soybean plant or plant cell with (iii) a nucleic acid molecule comprising a sequence encoding an acyl-CoA synthetase (ACoAS).

94. A method to produce the genetically modified soybean plant, descendant, cell, tissue, seed, or part thereof, that comprises:
(i) a nucleic acid molecule comprising a nucleic acid sequence encoding a polyunsaturated fatty acid (PUFA) synthase that produces at least one PUFA; and
(ii) a nucleic acid molecule comprising a sequence encoding a phosphopantetheinyl transferase (PPTase);
the method comprising transforming a soybean plant or plant cell with an expression cassette comprising: (i) a nucleic acid molecule comprising a nucleic acid sequence encoding a PUFA synthase; (ii) a nucleic acid molecule comprising a nucleic acid sequence encoding an acyl-CoA synthetase (ACoAS); and (iii) a nucleic acid molecule comprising a sequence encoding a phosphopantetheinyl transferase (PPTase).

95. The method of claim 94, wherein the PUFA is selected from the group consisting of DHA, EPA, and DPA(n-6).

The application's sequence listing, which the Patent Office published only in electronic form, follows.

SEQUENCE LISTING (64 sequences)

SEQ ID NO: 1 - protein, 2910 aa, Artificial sequence
  SzPUFA OrfA v3 protein
MAARLQEQKGGEMDTRIAIIGMSAILPCGTTVRESWETIRAGIDCLSDLPEDRVDVTAYFDPVKTTKDKIYCKRGGFIPEYDFDAREFGLNMFQMEDSDANQTISLLKVKEALQDAGIDALGKEKKNIGCVLGIGGGQKSSHEFYSRLNYVVVEKVLRKMGMPEEDVKVAVEKYKANFPEWRLDSFPGFLGNVTAGRCTNTFNLDGMNCVVDAACASSLIAVKVAIDELLYGDCDMMVTGATCTDNSIGMYMAFSKTPVFSTDPSVRAYDEKTKGMLIGEGSAMLVLKRYADAVRDGDEIHAVIRGCASSSDGKAAGIYTPTISGQEEALRRAYNRACVDPATVTLVEGHGTGTPVGDRIELTALRNLFDKAYGEGNTEKVAVGSIKSSIGHLKAVAGLAGMIKVIMALKHKTLPGTINVDNPPNLYDNTPINESSLYINTMNRPWFPPPGVPRRAGISSFGFGGANYHAVLEEAEPEHTTAYRLNKRPQPVLMMAATPAALQSLCEAQLKEFEAAIKENETVKNTAYIKCVKFGEQFKFPGSIPATNARLGFLVKDAEDACSTLRAICAQFAKDVTKEAWRLPREGVSFRAKGIATNGAVAALFSGQGAQYTHMFSEVAMNWPQFRQSIAAMDAAQSKVAGSDKDFERVSQVLYPRKPYEREPEQDHKKISLTAYSQPSTLACALGAFEIFKEAGFTPDFAAGHSLGEFAALYAAGCVDRDELFELVCRRARIMGGKDAPATPKGCMAAVIGPNAENIKVQAANVWLGNSNSPSQTVITGSVEGIQAESARLQKEGFRVVPLACESAFHSPQMENASSAFKDVISKVSFRTPKAETKLFSNVSGETYPTDAREMLTQHMTSSVKFLTQVRNMHQAGARIFVEFGPKQVLSKLVSETLKDDPSVVTVSVNPASGTDSDIQLRDAAVQLVVAGVNLQGFDKWDAPDATRMQAIKKKRTTLRLSAATYVSDKTKKVRDAAMNDGRCVTYLKGAAPLIKAPEPVVDEAAKREAERLQKELQDAQRQLDDAKRAAAEANSKLAAAKEEAKTAAASAKPAVDTAVVEKHRAILKSMLAELDGYGSVDASSLQQQQQQQTAPAPVKAAAPAAPVASAPAPAVSNELLEKAETVVMEVLAAKTGYETDMIEADMELETELGIDSIKRVEILSEVQAMLNVEAKDVDALSRTRTVGEVVNAMKAEIAGSSAPAPAAAAPAPAKAAPAAAAPAVSNELLEKAETVVMEVLAAKTGYETDMIESDMELETELGIDSIKRVEILSEVQAMLNVEAKDVDALSRTRTVGEVVNAMKAEIAGGSAPAPAAAAPGPAAAAPAPAAAAPAVSNELLEKAETVVMEVLAAKTGYETDMIESDMELETELGIDSIKRVEILSEVQAMLNVEAKDVDALSRTRTVGEVVDAMKAEIAGGSAPAPAAAAPAPAAAAPAPAAPAPAVSSELLEKAETVVMEVLAAKTGYETDMIESDMELETELGIDSIKRVEILSEVQAMLNVEAKDVDALSRTRTVGEVVDAMKAEIAGGSAPAPAAAAPAPAAAAPAPAAPAPAAPAPAVSSELLEKAETVVMEVLAAKTGYETDMIESDMELETELGIDSIKRVEILSEVQAMLNVEAKDVDALSRTRTVGEVVDAMKAEIAGSSASAPAAAAPAPAAAAPAPAAAAPAVSNELLEKAETVVMEVLAAKTGYETDMIESDMELETELGIDSIKRVEILSEVQAMLNVEAKDVDALSRTRTVGEVVDAMKAEIAGGSAPAPAAAAPAPAAAAPAVSNELLEKAETVVMEVLAAKTGYETDMIESDMELETELGIDSIKRVEILSEVQAMLNVEAKDVDALSRTRTVGEVVDAMKAEIAGSSAPAPAAAAPAPAAAAPAPAAAAPAVSSELLEKAETVVMEVLAAKTGYETDMIESDMELETELGIDSIKRVEILSEVQAMLNVEAKDVDALSRTRTVGEVVDAMKAEIAGGSAPAPAAAAPAPAAAAPAVSNELLEKAETVVMEVLAAKTGYETDMIESDMELETELGIDSIKRVEILSEVQAMLNVEAKDVDALSRTRTVGEVVDAMKAEIAGGSAPAPAAAAPASAGAAPAVKIDSVHGADCDDLSLMHAKVVDIRRPDELILERPENRPVLVVDDGSELTLALVRVLGACAVVLTFEGLQLAQRAGAAAIRHVLAKDLSAESAEKAIKEAEQRFGALGGFISQQAERFEPAEILGFTLMCAKFAKASLCTAVAGGRPAFIGVARLDGRLGFTSQGTSDALKRAQRGAIFGLCKTIGLEWSESDVFSRGVDIAQGMHPEDAAVAIVREMACADIRIREVGIGANQQRCTIRAAKLETGNPQRQIAKDDVLLVSGGARGITPLCIREITRQIAGGKYILLGRSKVSASEPAWCAGITDEKAVQKAATQELKRAFSAGEGPKPTPRAVTKLVGSVLGAREVRSSIAAIEALGGKAIYSSCDVNSAADVAKAVRDAESQLGARVSGIVHASGVLRDRLIEKKLPDEFDAVFGTKVTGLENLLAAVDRANLKHMVLFSSLAGFHGNVGQSDYAMANEALNKMGLELAKDVSVKSICFGPWDGGMVTPQLKKQFQEMGVQIIPREGGADTVARIVLGSSPAEILVGNWRTPSKKVGSDTITLHRKISAKSNPFLEDHVIQGRRVLPMTLAIGSLAETCLGLFPGYSLWAIDDAQLFKGVTVDGDVNCEVTLTPSTAPSGRVNVQATLKTFSSGKLVPAYRAVIVLSNQGAPPANATMQPPSLDADPALQGSVYDGKTLFHGPAFRGIDDVLSCTKSQLVAKCSAVPGSDAARGEFATDTDAHDPFVNDLAFQAMLVWVRRTLGQAALPNSIQRIVQHRPVPQDKPFYITLRSNQSGGHSQHKHALQFHNEQGDLFIDVQASVIATDSLAF

SEQ ID NO: 2 - protein, 2059 aa, Artificial sequence
  SzPUFA OrfB v3 protein
MAARNVSAAHEMHDEKRIAVVGMAVQYAGCKTKDEFWEVLMNGKVESKVISDKRLGSNYRAEHYKAERSKYADTFCNETYGTLDENEIDNEHELLLNLAKQALAETSVKDSTRCGIVSGCLSFPMDNLQGELLNVYQNHVEKKLGARVFKDASHWSEREQSNKPEAGDRRIFMDPASFVAEELNLGALHYSVDAACATALYVLRLAQDHLVSGAADVMLCGATCLPEPFFILSGFSTFQAMPVGTGQNVSMPLHKDSQGLTPGEGGSIMVLKRLDDAIRDGDHIYGTLLGANVSNSGTGLPLKPLLPSEKKCLMDTYTRINVHPHKIQYVECHATGTPQGDRVEIDAVKACFEGKVPRFGTTKGNFGHTLVAAGFAGMCKVLLSMKHGIIPPTPGIDDETKMDPLVVSGEAIPWPETNGEPKRAGLSAFGFGGTNAHAVFEEHDPSNAACTGHDSISALSARCGGESNMRIAITGMDATFGALKGLDAFERAIYTGAHGAIPLPEKRWRFLGKDKDFLDLCGVKATPHGCYIEDVEVDFQRLRTPMTPEDMLLPQQLLAVTTIDRAILDSGMKKGGNVAVFVGLGTDLELYRHRARVALKERVRPEASKKLNDMMQYINDCGTSTSYTSYIGNLVATRVSSQWGFTGPSFTITEGNNSVYRCAELGKYLLETGEVDGVVVAGVDLCGSAENLYVKSRRFKVSTSDTPRASFDAAADGYFVGEGCGAFVLKRETSCTKDDRIYACMDAIVPGNVPSACLREALDQARVKPGDIEMLELSADSARHLKDPSVLPKELTAEEEIGGLQTILRDDDKLPRNVATGSVKATVGDTGYASGAASLIKAALCIYNRYLPSNGDDWDEPAPEAPWDSTLFACQTSRAWLKNPGERRYAAVSGVSETRSCYSVLLSEAEGHYERENRISLDEEAPKLIVLRADSHEEILGRLDKIRERFLQPTGAAPRESELKAQARRIFLELLGETLAQDAASSGSQKPLALSLVSTPSKLQREVELAAKGIPRCLKMRRDWSSPAGSRYAPEPLASDRVAFMYGEGRSPYYGITQDIHRIWPELHEVINEKTNRLWAEGDRWVMPRASFKSELESQQQEFDRNMIEMFRLGILTSIAFTNLARDVLNITPKAAFGLSLGEISMIFAFSKKNGLISDQLTKDLRESDVWNKALAVEFNALREAWGIPQSVPKDEFWQGYIVRGTKQDIEAAIAPDSKYVRLTIINDANTALISGKPDACKAAIARLGGNIPALPVTQGMCGHCPEVGPYTKDIAKIHANLEFPVVDGLDLWTTINQKRLVPRATGAKDEWAPSSFGEYAGQLYEKQANFPQIVETIYKQNYDVFVEVGPNNHRSTAVRTTLGPQRNHLAGAIDKQNEDAWTTIVKLVASLKAHLVPGVTISPLYHSKLVAEAEACYAALCKGEKPKKNKFVRKIQLNGRFNSKADPISSADLASFPPADPAIEAAISSRIMKPVAPKFYARLNIDEQDETRDPILNKDNAPSSSSSSSSSSSSSSSPSPAPSAPVQKKAAPAAETKAVASADALRSALLDLDSMLALSSASASGNLVETAPSDASVIVPPCNIADLGSRAFMKTYGVSAPLYTGAMAKGIASADLVIAAGRQGILASFGAGGLPMQVVRESIEKIQAALPNGPYAVNLIHSPFDSNLEKGNVDLFLEKGVTFVEASAFMTLTPQVVRYRAAGLTRNADGSVNIRNRIIGKVSRTELAEMFMRPAPEHLLQKLIASGEINQEQAELARRVPVADDIAVEADSGGHTDNRPIHVILPLIINLRDRLHRECGYPANLRVRVGAGGGIGCPQAALATFNMGASFIVTGTVNQVAKQSGTCDNVRKQLAKATYSDVCMAPAADMFEEGVKLQVLKKGTMFPSRANKLYELFCKYDSFESMPPAELARVEKRIFSRALEEVWDETKNFYINRLHNPEKIQRAERDPKLKMSLCFRWYLSLASRWANTGASDRVMDYQVWCGPAIGSFNDFIKGTYLDPAVANEYPCVVQINKQILRGACFLRRLEILRNARLSDGAAALVASIDDTYVPAEKL

SEQ ID NO: 3 - protein, 1493 aa, Artificial sequence
  hSzThPUFA OrfC v3 protein
MALRVKTNKKPCWEMTKEELTSGKTEVFNYEELLEFAEGDIAKVFGPEFAVIDKYPRRVRLPAREYLLVTRVTLMDAEVNNYRVGARMVTEYDLPVNGELSEGGDCPWAVLVESGQCDLMLISYMGIDFQNQGDRVYRLLNTTLTFYGVAHEGETLEYDIRVTGFAKRLDGGISMFFFEYDCYVNGRLLIEMRDGCAGFFTNEELDAGKGVVFTRGDLAARAKIPKQDVSPYAVAPCLHKTKLNEKEMQTLVDKDWASVFGSKNGMPEINYKLCARKMLMIDRVTSIDHKGGVYGLGQLVGEKILERDHWYFPCHFVKDQVMAGSLVSDGCSQMLKMYMIWLGLHLTTGPFDFRPVNGHPNKVRCRGQISPHKGKLVYVMEIKEMGFDEDNDPYAIADVNIIDVDFEKGQDFSLDRISDYGKGDLNKKIVVDFKGIALKMQKRSTNKNPSKVQPVFANGAATVGPEASKASSGASASASAAPAKPAFSADVLAPKPVALPEHILKGDALAPKEMSWHPMSKLPGNPTPFFSPSSYPPRAICFIPFPGNPLDNNCKAGEMPLNWYNMSEFMCGKVSNCLGPEFARFDKSNTSRSPAFDLALVTRVVEVTNMEHGKFLNVDCNPSKGTMVGEFDCPQDAWFFDGSCNDGHMPYSIIMEIGLQTSGVLTSVLKAPLTMDKDDILFRNLDASAEMVRPDVDVRGKTIRNVTKCTGYAMLGKMGIHRFTFELSVDGVVFYKGSTSFGWFTPEVFAQQAGLDNGKKTEPWCKTNNTSVRRVEIASAKGKEQLTEKLPDATNAQVLRRSEQCEYLDYLNIAPDSGLHGKGYAHGHKDVNPQDWFFSCHFWFDPVMPGSLGIESMFQLIEAFAVDQNIPGEYNVSNPTFAHAPGKTAWKYRGQLTPKNRAMDCEVHIVSITASPENGGYVDIVADGALWVDGLRVYEAKELRVRVVSAKPQAIPDVQQQPPSAKADPGKTGVALSPTQLRDVLLEVDNPLYLGVENSNLVQFESKPATSSRIVSIKPCSISDLGDKSFMETYNVSAPLYTGAMAKGIASADLVIAAGKRKILGSFGAGGLPMHHVRAALEKIQAALPQGPYAVNLIHSPFDSNLEKGNVDLFLEKGVTVVEASAFMTLTPQVVRYRAAGLSRNADGSVNIRNRIIGKVSRTELAEMFIRPAPEHLLEKLIASGEITQEQAELARRVPVADDIAVEADSGGHTDNRPIHVILPLIINLRNRLHRECGYPAHLRVRVGAGGGVGCPQAAAAALTMGAAFIVTGTVNQVAKQSGTCDNVRKQLSQATYSDICMAPAADMFEEGVKLQVLKKGTMFPSRANKLYELFCKYDSFDSMPPAELERIEKRIFKRALQEVWEETKDFYINGLKNPEKIQRAEHDPKLKMSLCFRWYLGLASRWANMGAPDRVMDYQVWCGPAIGAFNDFIKGTYLDPAVSNEYPCVVQINLQILRGACYLRRLNALRNDPRIDLETEDAAFVYEPTNAL

SEQ ID NO: 4 - protein, 780 aa, Artificial sequence
  SzACS-2 v3 protein
MPTPDATAPLNKPSDYAVYHEEDGPFWTADSSGVSRVNFSETGVGSEGVIPALTLIDVFERAVKRGGNRIAFRTENMPTLRRGEEAPDALPLKDWKSWSWKQYKADVHRIARALMDLGVEQHDAVSIFGFNSPEWFLSAVGAVHAGAKIAGIYPSDTPAQVQYKAFHSDTAVAVVENEQCFKKFAEVVEDLPYLKAIVCWDYEATDITREDGSVVEVLTFAEFLKRGDTVEAAALDERISKIEPTMCAALIYTSGTTGRPKAVMISHDNLVFEASAVVPNLGGACTTTAEERILSYLPLSHVAGMMVDIIAPIIATAFHKGRICVCFARPYDLRTGTLGQRLNAVEPTIFLGVPRVWEKIQEKLMAVGAKTTGLKKKLSTAAKKRGLEFQEEQQIGRSGANPGFGPLGIYKKLLGLIKGKLGLTKCKFAFAGAAPMTRETLQYFGALNININEVYGMSECSGAATWSTDKAHEWGTVGYEMPSCEVRVFKIAEDGTKTECPRAADIMHATEEEQGEVCFRGRNIMMGYLANPKLGDDHVAEIEEKNAAAIDSEGWLHSGDKGAISTRGMLKITGRYKELIIGAGGENVAPVPIEDAIKARMPFVSNAMMVGDKRKFMAVLLTLKTVGATGELPGTNKLMGAAADYGETIEDACDNEALIEEITQQLKEIGDDGDVTPSNAARIQKFTILPLDFSVSTDELTATLKLKRSVVADKYEDIIEAFYESKSVFVPYSTVGAYATGGPVDDSVVDGSFKGDFSMIGDDDPDLQNVDVLEAIDEDN

SEQ ID NO: 5 - protein, 237 aa, Artificial sequence
  NoHetI v3 protein
MLQHTWLPKPPNLTLLSDEVHLWRIPLDQPESQLQDLAATLSSDELARANRFYFPEHRRRFTAGRGILRSILGGYLGVEPGQVKFDYESRGKPILGDRFAESGLLFNLSHSQNLALCAVNYTRQIGIDLEYLRPTSDLESLAKRFFLPREYELLRSLPDEQKQKIFFRYWTCKEAYLKATGDGIAKLEEIEIALTPTEPAKLQTAPAWSLLELVPDDNCVAAVAVAGFGWQPKFWHY

SEQ ID NO: 6 - DNA, 8733 bp, Artificial sequence
  SzPUFA OrfA v3 gene
atggcagcgaggctgcaagagcagaaaggaggtgagatggacacgaggattgcgatcataggcatgagcgccatacttccttgtggaaccacggtgagagagtcatgggagaccataagggctggcattgattgcctgtctgatcttcctgaggatcgtgttgatgtgactgcgtactttgacccagtcaagaccacaaaggacaaaatctactgcaagagaggaggtttcattcctgagtatgactttgatgcgcgtgagtttggtctcaacatgttccagatggaagattctgatgcgaatcagaccatctcacttctcaaggtcaaagaagcacttcaagatgctgggattgatgcacttggaaaggagaagaaaaacataggatgcgtgcttggcattggaggtggacagaagagttcacatgagttctacagcagactcaactatgtggttgtggagaaagtcttgagaaagatggggatgccagaggaagatgtcaaagtggctgtggagaagtacaaagcgaacttcccagaatggagacttgactctttccctggattccttgggaatgtcactgctggcagatgcaccaacacattcaacttggatggcatgaactgcgttgtggatgctgcatgtgcaagctccttgatagcagtcaaggttgcgattgatgaactgctctatggtgactgcgacatgatggtcactggtgcaacctgcacagacaactccattgggatgtacatggctttctcaaagacacctgtgttcagcacggacccaagtgtgagagcgtatgatgagaaaacgaaagggatgctcattggtgagggatcagccatgttggtgctcaaacgttatgcagatgcagtgagggatggtgatgagattcatgctgtgattcgtggttgtgcaagctcaagtgatggcaaagcagctggcatctacactcccacaatcagtggtcaagaggaagccttgagacgtgcatacaatcgtgcctgcgttgaccctgccactgtcactttggttgagggtcatgggactggcactccagttggagataggattgagttgactgcgttgaggaacttgtttgacaaagcgtatggtgaagggaacacagagaaagttgcagttggaagtatcaagtccagtattggtcatttgaaggctgttgctggtcttgctggaatgatcaaggtcatcatggctctcaaacacaagactttgcctggaacgatcaatgtggacaatccacccaatctctatgacaacactcccatcaatgagtcatccctctacatcaacacgatgaacagaccctggttccctccacctggtgttccgagacgtgctggaatatccagctttggctttggaggtgccaactaccatgcagtgttggaagaggctgaaccagagcacacgacagcgtacagactcaacaaacgtccacaaccggtgttgatgatggctgcaactcctgctgcgttgcagagcctttgtgaagctcagctgaaagagtttgaagctgcgatcaaggagaatgagacagtcaagaatactgcctacatcaagtgtgtcaagtttggagaacagttcaagttccctgggagcatacctgcgaccaatgcgagactgggattcttggtcaaagatgcggaggatgcgtgctccacgcttcgtgctatatgtgctcagtttgccaaagatgtgaccaaagaagcgtggaggcttccgagagaaggagtttctttccgtgccaaaggcattgccaccaatggtgctgttgctgcactcttctctggacaaggtgctcagtacacacacatgttcagtgaagttgcgatgaactggcctcagttcagacagtccattgctgcaatggacgctgcacagtccaaggttgctggaagtgacaaagactttgaaagagtctctcaagtcctgtacccaaggaaaccgtacgaacgtgagccagaacaagatcacaagaaaatctcactcacagcatacagccagccgtcaaccctggcatgtgctcttggtgcctttgagattttcaaggaagctggattcactccagactttgcagctggacacagcttgggtgagtttgctgcgctctatgcagctggttgtgttgacagagatgagttgtttgaacttgtttgcagaagggcaaggatcatgggaggcaaagatgcacctgccacacccaaaggttgcatggcagctgtcataggacccaacgcagagaacatcaaggttcaagctgccaacgtctggcttggaaactcaaactctccgtctcagactgtcattactgggtctgttgaagggattcaagctgaaagtgccagattgcagaaggaagggttcagagttgtgcctcttgcttgtgagtctgccttccattctccacagatggaaaatgccagctcagctttcaaagatgtcatatccaaggtttccttccgtacacccaaagcagaaacaaagctcttcagcaatgtttctggagagacctatccgacggatgccagagagatgctcactcaacacatgacctcatctgtgaagttcctgacccaagtgaggaacatgcaccaagctggtgcgagaatctttgttgagtttggaccgaaacaagttctcagcaaacttgtttctgaaaccctcaaagatgacccgtctgttgtcacagtgtctgtgaacccagcttctggcacggactctgacatacagttgagggatgctgcagttcagctggttgtggctggtgtcaatcttcaagggtttgacaagtgggatgctcctgatgccacgaggatgcaagccatcaagaaaaagagaaccacactcagactttcagctgccacctatgtcagtgacaagaccaagaaagtgagggatgctgccatgaacgacggaagatgtgtcacatacctcaagggtgctgcaccactcatcaaggctcctgaacctgtggttgacgaagctgccaagagggaggctgaaaggcttcagaaggagcttcaagacgctcagaggcagcttgacgacgccaaacgtgcagctgcagaagccaactccaaacttgctgctgccaaggaggaagccaagactgctgcagcttcagccaagcctgcagttgacactgctgttgtggagaaacatcgtgccatcctcaagtccatgctggctgagctggatggttatggaagtgttgatgcttcttcccttcagcaacagcaacagcaacagactgctccggcgcctgttaaagccgctgcccctgccgctcccgttgcaagtgctcctgctcccgccgtgtccaacgagttgcttgagaaagctgagacagttgtgatggaggttctcgctgccaagactggatacgaaacagacatgattgaggcggacatggagcttgagactgagttgggaattgacagcatcaagagggttgaaattctttctgaagtccaagctatgcttaacgttgaggcgaaagatgttgatgctctctctaggacgagaacagtgggtgaagttgtcaacgctatgaaggcagaaatcgctggttcttccgctccggcgccggcagctgccgcacctgcaccggctaaagcggctccagctgcagctgcaccagctgtttctaatgagctgctcgaaaaggcagaaactgttgtgatggaagtccttgctgccaaaactggctacgaaactgacatgatagaatcagacatggagcttgagacggagcttggaattgattccatcaagcgtgtggaaatcctcagtgaagtccaagccatgctcaatgtggaagctaaggatgtggatgctctctcaaggaccagaactgtcggtgaggttgtcaatgccatgaaggctgagatagctggaggctccgctcctgcgccggccgctgccgctcctggtcccgctgccgcggctccagctccagctgcagccgctccggccgtctcaaacgaactccttgaaaaagctgagaccgtcgtgatggaggtcttggcagctaaaaccggctatgagactgacatgattgagtctgacatggaattggagacagaacttgggatagacagcatcaaacgtgttgaaatcctcagtgaggtccaagctatgctgaacgtggaagcgaaggatgttgatgctctgtccagaacgaggaccgttggtgaggttgtggatgccatgaaggctgaaattgctggagggtctgcgcccgcgccagctgcagccgctcctgcacccgcagccgcggcacctgctccagctgcacctgcacctgccgtttcttcagaactcttggagaaggctgagacggttgtgatggaggttttggctgcaaagactggctatgagaccgacatgattgaatctgatatggaattggagacagagcttgggatcgattccatcaaaagagtggagatcctgagtgaagtccaagccatgctcaatgttgaagctaaggatgttgatgcactttcaagaacaaggacagtgggtgaggttgtggatgccatgaaggcggagattgctggagggagcgcgcctgcgccagctgccgcggcacctgcaccggcagccgcagctccagctccagctgcaccagcaccggccgcgcccgcgccagctgtttcatccgaactcctggaaaaggccgagacggttgtgatggaggtgctcgcagctaagactggttacgagaccgacatgattgaaagtgacatggagcttgaaaccgagttgggaatagatagcatcaaacgtgttgaaatcttgtctgaggtccaagctatgttgaacgtggaggcaaaagatgtcgatgcgctttcaagaaccagaacagtcggtgaggtcgtggacgccatgaaggctgaaattgccggaagctctgctagtgcgccagctgcagccgcacctgcacctgctgccgcggcacctgctccagctgcagccgctcctgccgtcagcaatgagttgctggagaaagccgaaacagttgtgatggaagtccttgctgcaaaaactggttacgaaacggacatgattgagtcagacatggaattggagaccgaacttggaatagattccatcaagagagtggagatcctctctgaggtgcaagccatgctcaacgttgaggctaaagatgttgatgcactcagtaggacaagaactgtgggggaagttgtcgatgcgatgaaggctgagattgctggaggctctgctcctgcgccggcagctgccgcacctgcacccgcagccgcggcaccagctgtcagcaacgaattgcttgagaaggctgaaacagttgtcatggaagtgctggctgcaaaaaccggctatgagactgacatgattgagtctgacatggaacttgagacggaattgggcattgacagcatcaagcgtgttgagatcctcagtgaagtccaagcaatgctcaatgtggaggctaaggatgtggatgccctctcaaggaccagaacagttggtgaggtcgttgatgcgatgaaggcggagatcgctggaagttccgcgcctgcgccagctgcagccgctcctgcacccgcagccgcggcaccggctccagctgcagccgcaccggccgtctcctcagaactcctggaaaaggctgagacagttgtgatggaagtccttgctgcgaaaactggctatgagaccgacatgattgaatctgacatggaactggagaccgagcttggaattgactccatcaaacgtgttgaaatcctctctgaggttcaagcgatgttgaatgtggaggccaaagatgttgatgctctttccagaacaaggacggtgggagaggtggttgatgccatgaaggctgagatagctgggggttctgctcctgcgccagctgcagccgctcctgctcccgctgccgcggcaccagctgtcagcaacgaactccttgaaaaagctgaaactgttgtgatggaggttttggctgcaaagactggatacgagactgacatgatagagtcagacatggagttggaaacagagcttgggattgatagcatcaagcgtgtggaaatcctttctgaggttcaagccatgctgaacgttgaggccaaagatgtcgatgctttgtcaaggaccagaacggttggagaagtggtcgatgccatgaaggctgagatagctggtggatcagcccctgctccggctgcagccgctcctgcaagtgccggtgctgcaccagctgtgaagattgattcagttcatggtgctgactgtgacgatttgtcactgatgcacgcaaaggtggttgacatcagaaggccagatgaactgattctggaaagaccggagaaccgtccagttcttgtcgttgacgatggctcagagttgacacttgctcttgtgagggtgttgggagcctgtgcagttgtcttgacctttgagggattgcagttggctcagagagctggtgcagctgccattcgtcatgttctggctaaggacctttcagcagaatcagctgagaaggccatcaaagaggctgagcaaagatttggagcgttgggaggcttcataagccagcaagcagaaaggtttgaaccagctgagatactgggtttcacactcatgtgtgcgaagtttgccaaagcctctctctgcactgctgtggctggaggtcgtcctgccttcatcggtgtggctaggcttgacggcagacttggattcacctctcaaggcacttctgacgcactcaagagagcacagcgtggagcgatctttggactctgcaagacaatagggttggagtggtcagaatctgatgtgttcagccgtggtgtggacattgctcaagggatgcacccagaagatgctgcagttgccatagttagggagatggcgtgtgctgacatcagaatcagagaggttgggattggagcaaaccagcaaagatgcacaatcagagctgccaagttggagactgggaaccctcagagacagatagcgaaagacgatgtgcttctggtttctggaggtgctcgtgggatcacacctctttgcatccgtgagatcacgcgtcagattgctggaggcaagtacattctgttgggtcgtagcaaagtttctgcgtctgaaccagcatggtgtgctggcatcactgatgagaaggctgtgcagaaagctgccacccaagagttgaagagggccttcagtgctggtgaaggacccaaacccactccaagggctgtcacgaaacttgtgggatctgttcttggtgctcgtgaagtgagaagctccattgctgccattgaagctctgggtggcaaagcgatctacagctcttgtgatgtgaactctgctgcagatgttgccaaagcagttagggatgcagagtcccagcttggtgccagagttagtggaatcgttcacgcttctggtgtgctccgtgatcgtctcatagagaagaaactccctgacgagtttgatgctgtctttgggaccaaagtcactgggttggagaatcttctggctgcagttgatcgtgccaacctcaaacacatggttctcttcagctcccttgctggtttccacggcaatgttggtcagtctgactatgcgatggcaaacgaagctctcaacaagatgggtttggaacttgcgaaggatgtcagtgtcaagtccatctgctttggtccctgggatggtgggatggtgacacctcaactcaagaaacagtttcaagaaatgggagttcagatcattcctcgtgaaggaggtgctgatacagttgcgaggattgtgttgggatcaagtcctgctgagatccttgttggaaactggaggacaccatccaagaaagttggaagtgacacgatcaccctgcatagaaagatcagtgccaagtccaatcccttcttggaggatcatgtcatacaaggcagaagggtgttgccaatgacccttgctattgggagccttgctgagacctgccttggactcttccctggctactctctctgggccatagatgacgcacagctcttcaaaggtgtcactgttgatggagacgtcaactgtgaagtgaccctcacaccgtccactgctccgagtgggagggtgaatgtccaagcgacgctcaagacgttctcaagtggaaaacttgttccagcctacagagctgtcatagtgttgtccaaccaaggtgctccacctgccaatgcaaccatgcagcctccgagccttgatgcagatcctgctttgcaagggtcagtctatgatggcaagactctctttcatggtcctgcgttcagaggcattgatgacgttctcagctgcaccaagagccagcttgttgccaagtgttctgctgttcctggatcagatgcagccagaggagagtttgcaactgacactgatgcacatgatccctttgtcaatgatcttgcctttcaagcaatgttggtctgggtgaggagaacgctgggacaagctgcactcccgaactccattcagaggatagtccaacacagaccggtcccacaagacaaacccttctacatcaccctcagatccaatcagagtggtggacatagccagcacaaacatgcacttcagttccacaacgaacaaggtgatctcttcattgatgttcaagcctctgtcattgcgacagactcacttgcgttctga

SEQ ID NO: 7 - DNA, 6180 bp, Artificial sequence
  SzPUFA OrfB v3 gene
atggctgcaaggaacgtgagtgcggctcatgagatgcatgacgagaagaggatagctgttgtgggcatggctgttcagtatgctggatgcaaaacgaaagacgagttctgggaagttctcatgaatggaaaagttgagagcaaagtgatcagcgacaaacgtcttggttcaaattaccgtgctgaacactacaaagctgaaaggagcaagtatgctgacaccttctgcaatgagacatatggaactcttgatgagaacgaaatagacaatgagcatgaactccttttgaaccttgccaaacaagccttggctgaaacatctgtcaaagattcaacaagatgtggcatagtttctggatgcctcagcttcccgatggacaacctccaaggtgaactcttgaatgtgtaccagaaccatgttgagaagaaacttggtgccagagttttcaaagatgcctctcactggtcagaaagagaacagtccaacaaaccagaggctggtgacagaagaatcttcatggaccctgcttcctttgttgctgaggaactcaatcttggcgctctccactactctgttgatgctgcctgtgccactgcgctctatgtgctcagactggcgcaagatcacttggtctctggtgcagctgatgtgatgctttgtggtgcaacatgcctgccggagccgtttttcatactctctgggttctcaaccttccaagccatgcctgttggaacgggtcagaatgtgtccatgccgctgcacaaagattctcaaggattgacccctggtgaaggaggttccatcatggtcctcaaacgtttggatgacgcaatcagagatggagatcacatctatggaacacttttgggagccaatgtcagcaacagtggcactggtctgccacttaaaccccttttgccgtcagagaaaaagtgcctcatggacacctacacacgtatcaatgtgcatccccacaagattcagtatgttgaatgccatgcaactgggactccacaaggtgatcgtgtggaaattgatgctgtgaaggcttgctttgaaggcaaagtcccacgttttggaaccacaaaagggaactttggacacacattggtggcagctgggtttgctggcatgtgcaaagtgcttctctccatgaagcacgggatcattccacccactccgggaatagatgacgaaacgaagatggaccctctggttgtctctggtgaggccattccctggccagaaacgaatggagaaccgaagcgtgctggtctctcagcgtttggatttggtgggaccaatgctcatgctgtctttgaggaacatgacccaagcaatgctgcatgcactggccatgactccatttctgctctctctgcacgttgtggtggtgagtcaaacatgagaatagcaatcactgggatggatgccacttttggtgctttgaaaggattggatgcttttgaaagggccatctacactggtgctcatggtgctataccactcccagaaaagagatggagattcctggggaaagacaaggacttccttgatctttgtggagtcaaagcaacaccgcatggctgttacattgaagatgttgaagttgatttccagaggctgaggactccaatgactcctgaagatatgctcttgcctcaacagcttctggctgtcaccacaattgatagggccatattggactctggcatgaagaaaggtggaaatgtggctgtctttgtggggttggggaccgatcttgaactctaccgtcaccgtgcaagggttgctctcaaggagagagtgaggcctgaagccagcaagaaactcaatgacatgatgcagtacatcaatgattgtgggacaagcacttcttacaccagctacataggcaacttggttgcaacaagggtcagttcacaatggggcttcacgggaccttccttcacaatcacagaaggcaacaattctgtgtacagatgtgctgaacttggcaaatacctcttggaaacgggagaggttgatggggttgtggttgcgggtgttgatctctgtgggagtgctgagaacctttacgtcaagtcaaggcgtttcaaggtgtctacatctgacaccccgagagccagctttgatgcagctgctgatggttactttgttggagagggctgtggtgcatttgtgctcaagcgtgagacaagctgcaccaaggatgacagaatctatgcttgcatggatgccatagttcctggaaatgttccatctgcatgtttgagagaggcattggatcaagccagagtcaagcctggagacatcgagatgttggagctttctgctgattcagcgaggcatttgaaggacccgtctgttctcccaaaggaactcactgctgaggaagagattggcggacttcagacgattcttcgtgacgatgacaagctcccaaggaatgttgcaactggaagtgtcaaggccactgttggtgacactggttatgcttctggtgctgccagtttgattaaggctgcgctttgcatctacaaccgttacctgcccagcaatggagatgactgggatgaacctgcacctgaagcaccctgggacagcacactctttgcgtgccagacctcaagagcttggttgaagaaccctggtgagagacgttatgcggctgtttccggagtcagtgaaaccagaagttgctacagtgtgctgctttctgaagcagagggacactacgagagagagaacagaatcagtttggatgaggaagcacccaagctcattgtgttgagagcagactcccatgaagagattcttggaagattggacaagataagggaaaggttcttgcagcccacgggtgctgcacccagagagtctgaattgaaggcgcaagcccgtaggatctttcttgaactccttggtgagacccttgcccaagatgcagcttcatctggaagtcagaagccccttgctctcagcttggtctccactccatccaagctccagagagaggtggaacttgcggcaaaaggcattccgagatgtctcaagatgagacgtgattggagttcccctgctggaagcagatatgcgcctgagcctttggccagtgacagagttgccttcatgtatggagaaggaaggagcccttactatggcatcacacaagacattcataggatttggcctgaacttcatgaggtcatcaatgagaaaacaaaccgtctctgggctgaaggtgacagatgggtcatgccaagggccagcttcaagagtgagcttgagtcacaacagcaagagtttgacagaaacatgattgaaatgttccgtcttggaatcctcacctcaattgccttcacaaacctggcgagagatgttctcaacatcacgcccaaagcagcctttggactcagtttgggagagatttccatgatctttgctttctccaagaaaaacggtttgataagcgatcagttgacaaaggatttgagagagtcagatgtctggaacaaagctctggctgttgagttcaatgcgctcagagaagcctggggcattccacagtctgtcccaaaagatgagttctggcaaggttacatagtgaggggaacgaaacaagacatagaagcagccatagcaccagactcaaagtatgtgaggttgaccatcatcaatgatgccaacactgctctcatcagtggaaagcctgatgcatgcaaagctgcgattgctcgtcttggtggcaacatccctgcgcttccagtcactcaaggcatgtgtgggcattgcccagaggtgggaccttacaccaaggacatcgcaaagatccacgccaaccttgagttccctgtggttgatggtcttgatctctggactaccataaaccagaagaggcttgtgccaagagccacgggtgccaaagatgaatgggctccttcatcctttggggagtatgctggacagctctatgagaaacaagccaacttccctcagatagttgaaaccatctacaagcagaactatgatgtgtttgttgaagttgggccaaacaatcacagaagcacagcagtgagaaccacgcttggaccacagagaaaccaccttgctggtgccatagacaagcagaacgaggatgcttggacgacaatagtcaagctcgtggcttcattgaaggctcaccttgttcctggagtgaccatcagtccgctctaccactccaagctcgttgcagaggctgaggcttgttatgctgcgctctgtaaaggtgagaaacccaagaaaaacaagtttgtgagaaagattcagttgaatggcagattcaacagcaaggcagaccccatctcctcagcagaccttgcatccttcccacctgcggaccctgcgattgaagctgccatctcttcaaggatcatgaagcctgtggctccgaaattctatgcgcgtctcaacattgatgagcaagatgagaccagagatccgatcttgaacaaggacaatgcgccttccagctccagctcttccagcagttcctcttccagcagttcatctccgtctcctgctccttcagctccagttcagaagaaagctgccccagctgcggagacaaaagctgttgccagtgctgatgcacttcgtagtgccctgcttgatcttgactccatgcttgcgctcagctctgcaagtgcttctggcaaccttgttgagactgcgccatctgatgccagtgtcattgtccctccgtgcaacattgctgatcttggcagcagagctttcatgaaaacttatggtgtttctgcgcctctgtacaccggtgcaatggccaagggaattgcctctgcggacttggtgatcgcagctggaaggcaaggaatccttgcgtcatttggtgctggaggccttccaatgcaagttgtgcgtgagtccattgaaaagattcaagctgccctgcccaatggaccatatgctgtcaacctcatccattctccttttgacagcaaccttgagaagggaaatgttgatctcttcttggaaaagggtgtcacttttgttgaggcttcagccttcatgacgttgacaccgcaagttgtcagatacagagcggctgggttgacgaggaatgcagatgggtcagtcaacataaggaacagaatcattgggaaagtctccagaactgagctggctgaaatgttcatgcgtcctgcacctgagcatcttttgcagaagctcattgcttctggggagatcaatcaagaacaagctgagttggccagacgtgttcctgtggctgatgacattgcggttgaagctgattctggtggacacactgacaaccgtccaatccatgtcattctgcctctgattatcaacctgagggataggcttcacagagagtgtggatacccagcaaacctgagggttcgtgttggtgctgggggtggcattgggtgtccccaagctgcgctggcaactttcaacatgggtgcctctttcattgtcactggaacagtgaaccaagttgccaaacaatctgggacgtgtgacaatgtgaggaaacagcttgcgaaagcaacttactcagatgtttgcatggcaccggcagctgacatgtttgaggaaggtgtgaaacttcaagttttgaagaaaggaacaatgttcccttcaagagccaacaaactctatgagttgttctgcaagtatgattcttttgagtccatgcctccagcagagcttgcgagggttgagaaaagaatcttcagtcgtgcattggaagaggtctgggatgagaccaagaacttctacatcaaccgtctccacaacccagagaagatacagagggctgagagggaccccaaactgaagatgtcactgtgtttcagatggtatctgtccctggcttcaaggtgggccaacactggagcttctgacagagtcatggactaccaagtttggtgtggtcctgccattggttcattcaatgatttcatcaaaggaacttaccttgatccggcagtggcaaatgagtacccgtgtgttgtgcagatcaacaaacagattcttagaggagcgtgcttcttgaggcgtcttgaaatactgagaaatgcaaggctttcagatggtgcagctgcacttgtggcgagcattgatgacacatatgtccctgctgagaagctgtga

SEQ ID NO: 8 - DNA, 4482 bp, Artificial sequence
  hSzThPUFA OrfC v3 gene
atggcgcttcgtgtcaagaccaacaagaagccatgttgggagatgaccaaggaggaactgacctctggcaaaactgaggtgttcaactatgaggaactcctggagtttgcagagggtgacatagctaaggtttttggtccggagtttgctgtcatagacaagtaccccagaagggtgaggctgcctgctcgtgaatacctgcttgtgacaagggtcacactcatggatgccgaggtcaacaactacagagttggtgccagaatggtcactgagtatgatcttccagtgaatggcgaattgtctgagggaggtgattgtccctgggcagttctggttgagagtggacagtgcgatttgatgctgatatcatacatgggaattgatttccagaaccaaggtgacagagtttaccgtctgctcaacaccacgttgacattctatggggttgcccatgagggagagacccttgagtatgacatcagagtgaccggttttgccaaacgtttggatggtggcatctccatgttcttctttgagtatgactgctatgtcaatgggaggcttctcattgagatgagagatggctgtgctggcttcttcacaaatgaggagcttgatgcgggaaagggtgtggtgttcacaagaggggatttggctgccagagctaagattccaaagcaagatgtttctccctatgctgtcgctccctgccttcacaaaacaaaactcaacgaaaaggagatgcagaccttggttgacaaagattgggcttccgtttttggctcaaagaatggcatgccggagatcaactacaaactctgcgcacgtaagatgctcatgattgatagagtcaccagcattgaccataagggaggtgtgtacggtttgggtcagttggttggtgagaaaatcttggagagggaccattggtacttcccatgccattttgttaaggatcaagtcatggctggatctcttgtcagcgacggttgttcacaaatgctcaagatgtacatgatctggctcggtttgcaccttaccaccggaccatttgacttcagacccgtcaacggacacccgaacaaagttaggtgtaggggtcagatatctcctcataagggaaagttggtctacgtcatggagatcaaagagatgggattcgacgaggataacgatccgtacgccattgctgacgtcaacatcattgacgttgatttcgaaaagggtcaagatttcagccttgatagaatcagcgactacggaaagggggatcttaacaaaaagatcgtcgtggacttcaagggcattgctctcaagatgcagaagagatccacgaacaagaacccctccaaagttcagcccgtttttgctaacggtgcagccactgtgggaccggaagcgtccaaggccagctctggtgccagtgctagtgcttctgctgcccctgcgaagcctgctttctcagcagatgttcttgcgccaaagccagttgcacttcctgaacatatcctcaagggtgacgctctcgctccgaaagaaatgtcctggcatcccatgtcaaaacttcctggcaacccgacgccgttcttctcccctagttcttaccctccgagggcaatttgcttcatccctttccctggcaacccacttgacaacaattgcaaagctggagaaatgcctctgaactggtacaacatgtcagagttcatgtgtggaaaagttagcaactgcttgggaccagagttcgcaagatttgataagtcaaatacgagcagaagccctgcttttgatttggctcttgtgactagagttgttgaagtcacaaacatggaacatggcaagttcctgaatgttgattgcaatcccagcaaaggcacaatggtgggggagtttgactgtcctcaagatgcgtggttctttgatggttcttgcaatgatgggcacatgccttattccatcatcatggaaatcggacttcagacatccggtgttctcaccagtgtgttgaaagcaccactgacgatggacaaagatgacattctctttaggaaccttgatgcaagtgctgaaatggtgaggccagatgtggatgtgagggggaaaaccataaggaatgtgaccaagtgcactggatatgcaatgttgggaaagatggggattcacagattcacgtttgagttgtctgttgatggcgtggttttctacaaaggaagcacttcctttggatggttcactccagaggtgtttgctcagcaagctggacttgacaatgggaaaaagacggagccttggtgcaaaactaacaacacgagtgtgagaagagttgaaatcgcatcagccaaaggcaaagaacagctgactgagaaacttccagatgcaactaatgctcaagttctcagaaggtcagaacagtgtgagtatttggattacctcaacattgctcctgattctgggctgcatgggaaaggatatgcgcatggacacaaagatgttaacccacaagactggttcttctcttgtcacttttggtttgatcctgtgatgcctggatctttgggaattgagtcaatgttccagctcattgaggcatttgcggtggaccagaacataccgggagaatacaatgtgagcaatccgacctttgcccatgcccctggaaaaacggcgtggaagtaccgtggtcaattgacaccaaagaaccgtgcgatggactgtgaggtgcacatagtttcaatcacagcctctcctgaaaatggaggctacgttgacatagtggcagatggagcactttgggttgatggtctccgtgtgtatgaagccaaagaactcagagttcgtgttgtcagtgcaaaacctcaagccattccggatgttcaacaacagccacccagcgcaaaagcggaccctgggaaaactggagttgcactcagtccgactcagttgagagatgtcctgcttgaagtggacaatccattgtatcttggtgttgaaaactccaatttggtgcagtttgaatccaaacctgcaacttcttcaaggattgtcagtatcaaaccatgctccataagtgatcttggtgacaagtccttcatggaaacgtacaatgtgtcagcacctctgtacactggagcaatggccaagggaattgcgtctgcggaccttgtcattgctgctgggaagaggaagatattgggttcttttggagcgggtgggcttccaatgcaccatgtgagggcagctttggagaagatacaagcggctctgcctcaaggaccatatgctgtgaacctcattcattcaccttttgacagcaacttggaaaaggggaatgttgatctcttcctcgaaaagggcgttactgtggtggaggcttctgcattcatgaccctcactccccaagttgttcgttaccgtgcagccggactctcaaggaacgctgatgggagtgtcaacatcagaaaccgtatcattggaaaagtgtccagaacagaactcgccgaaatgttcatcagaccggctccggaacacctccttgagaaactcatagcttctggtgagataacacaagaacaagccgaacttgcccgtcgtgttcctgtcgcagacgacatcgctgttgaagctgattctggtggtcacactgacaaccgtcccatccacgtcatcttgcctttgatcatcaaccttaggaacagactgcacagagagtgtggttatcctgcgcaccttagagtcagagttggagctggaggcggtgttggctgcccacaagctgctgcggctgccctcacaatgggagctgccttcatagtgactgggactgtcaatcaagttgctaaacagtccgggacatgtgacaacgtgagaaaacaactcagtcaagccacctacagtgacatttgcatggctccagcagctgatatgtttgaggaaggtgtgaaactccaagttctcaagaagggaacaatgttcccatcaagagctaacaaattgtacgaactcttttgcaagtacgactctttcgattcaatgcctcctgctgaacttgaaaggatcgagaagaggatcttcaagagggcacttcaagaggtctgggaagagaccaaggacttttacatcaatggtttgaagaatccagagaagatacagagagcggaacatgaccccaaactcaagatgtctttgtgtttcagatggtatcttggtcttgcatcacgttgggccaacatgggtgctcctgatcgtgtcatggactatcaagtctggtgtggtccagccattggagccttcaatgacttcatcaaaggaacatatcttgatcctgctgtctctaatgagtacccatgtgttgtccagatcaaccttcagattttgcgtggtgcatgttacctgaggcgtcttaatgctctgagaaatgatccgaggattgatcttgagactgaagatgctgcctttgtctatgagccaacgaatgcgctttga

SEQ ID NO: 9 - DNA, 2343 bp, Artificial sequence
  SzACS-2 v3 gene
atgcccactccagatgccactgcgcctctcaacaagccgtcagactatgctgtgtaccacgaagaggatggtcctttctggactgctgattcctctggtgtcagcagagtgaacttctctgaaactggtgtgggatctgaaggtgtcattcctgcgctcacactgattgatgtgtttgagcgtgcggtcaaacgtggtggcaataggattgcattcagaacagagaacatgccaaccttgaggcgtggagaagaggctcctgatgctttgccgctcaaagattggaagtcctggtcttggaaacagtacaaagctgatgttcacagaattgcgagggctctgatggatttgggagttgagcagcacgatgcggtctccatctttggcttcaactcaccagaatggttcctcagtgctgtcggtgcagttcatgctggtgccaagatcgctggaatctacccttcagacactcctgctcaagtgcagtacaaagccttccactctgacactgctgttgcagttgtggagaacgaacagtgcttcaagaaattcgcagaggtggttgaggatctcccttacctcaaagccattgtttgttgggattatgaagccacagacatcacaagggaagatggttcagtggttgaagtcctgacctttgctgagttcctgaagagaggtgacactgtggaagcagctgcacttgatgagagaatcagcaagattgagcccaccatgtgtgctgccctgatctacaccagtggcacaactgggagacccaaagctgtcatgatctcccatgacaaccttgtctttgaagcatctgctgtggtcccgaacttgggaggggcatgcacgaccactgctgaggaaaggattctttcctaccttcctttgtctcatgttgctggaatgatggttgacatcattgctccaatcatagcgacagcgttccacaaaggaaggatctgtgtttgttttgccagaccgtatgatttgagaactggaacccttgggcaaagactcaatgcagtggagccaaccatattccttggtgtgccacgtgtgtgggaaaagatccaagagaaattgatggctgttggtgccaaaaccactggtctcaagaagaaactcagcacggcagccaagaaacgtgggcttgaatttcaagaggaacaacagatagggagaagtggtgccaaccctggctttggaccgcttggaatctacaagaaacttttgggcctcatcaaaggaaagttggggctgaccaaatgcaagtttgcctttgctggcgcagctccaatgacccgtgaaacccttcagtactttggagcgctgaacatcaacatcaatgaggtctatggaatgtctgaatgcagtggggctgccacctggtcaactgacaaagctcatgagtggggcactgttggctatgagatgccctcctgtgaagtcagagtgttcaagattgcggaggatggcaccaagacagagtgcccaagagctgctgacatcatgcatgccacagaagaggaacaaggtgaagtttgcttccgtggaaggaacatcatgatgggatacttggccaacccgaaacttggtgatgaccatgttgctgagattgaagagaagaatgcagctgccatagatagcgaagggtggcttcactctggtgacaagggagcaatttccacaaggggaatgctcaagataacgggcagatacaaggagcttatcataggtgctggtggggagaatgtggctcctgttcccattgaagatgccatcaaggcgaggatgccttttgtttcaaatgcaatgatggttggagacaagaggaagttcatggctgtccttctgactttgaaaacggttggagcaactggagagcttcctggcacaaacaagctcatgggagcagctgcggactatggtgagaccattgaggatgcctgtgacaatgaggcgctcattgaagagataacgcagcaactcaaagagataggtgacgatggagatgtcacgccaagcaatgcagcccgtatacaaaagttcacgattttgccactcgacttcagtgtctccacagatgaactgacagcaacgttgaaattgaagagaagtgtggttgcagacaagtatgaggacatcatagaggctttctatgagagcaagtctgtctttgtgccttactcaacagttggagcttatgcaacgggtggaccagttgatgactctgttgtggatggatcattcaaaggtgactttagcatgattggggatgacgatccggatcttcagaatgtggatgtccttgaagcaattgatgaggacaactga

SEQ ID NO: 10 - DNA, 714 bp, Artificial sequence
  NoHetI v3 gene
atgcttcagcacacttggcttccgaagcctcccaatctgaccctcttgtcagatgaggttcatctctggaggattcctcttgaccagcctgagtcacaacttcaagaccttgctgccaccctgagcagtgatgaattggcgagggcaaacagattctactttccagaacacagaaggcgtttcactgctgggagaggcatcctcagatccatcttgggtggatacttgggagtggaaccgggtcaagtcaagtttgattatgagtcccgtgggaaaccgatccttggtgacagatttgctgagagtggactcctgttcaacttgtctcacagccagaaccttgccttgtgtgctgtcaactacacgcgtcaaataggcattgatcttgaatatctgcgtccaacatctgacttggagtctcttgcaaagaggttctttctcccaagagaatatgaactcttgaggtcactccctgatgagcagaaacagaagattttctttcgttactggacttgcaaagaggcttatctcaaagcaacgggagatggaatagccaaacttgaagagatcgagatagcactcaccccaacagaacctgccaagctccaaacagctcctgcgtggtctctgttggagcttgtgccagatgacaattgtgttgcagctgtggctgttgcgggttttggttggcagcccaagttctggcattactga

SEQ ID NO: 11 - DNA, 33003 bp, Artificial sequence
  pDAB7362 T-strand
cagtcagcatcatcacaccaaaagttaggcccgaatagtttgaaattagaaagctcgcaattgaggtctacaggccaaattcgctcttagccgtacaatattactcaccggatcctaaccggtttaattaaggcgcgccatgcccgggcaagcggccgcacaagtttgtacaaaaaagcaggcttctagacctaggtggagtcatcacgcagactatctcagcatgtgcgtagcacgcggccgcagcttatagtaaagatttttttgttaataaaatgaaagttaatatttatggatttatttgaacatatttacaagtttttgttaataaatttatttacagaagtgttaaatttgaaaatgtgttaaatgagagttaatatttatggatataatattactttatttaaaaataaaatgaatttatattaaaatatgatttggtaaaagatattataaagaggaacttggatgagaaagacgacgatgggcaaaagttgcatggcacaccgcttttgttcagtaacatctgcactgtggcgcctttttcacactcaccatgcatgctgccacgtcagctttcacactatgacaccactggccatacacgttgccacctcagctttctcctcttctcactatgacacgactggccatgcatgcatgcatgctgccacctcagctcccgcctcttcacccgtgtctttctctcatgtcgcagtgctgcgtgccaacctcttctctctataaatagagagaagagaatgatggttaaactcaaaccaaaacaagaaaacatacacaaatagcaaaacggatccacaaccaaaaatggcagcgaggctgcaagagcagaaaggaggtgagatggacacgaggattgcgatcataggcatgagcgccatacttccttgtggaaccacggtgagagagtcatgggagaccataagggctggcattgattgcctgtctgatcttcctgaggatcgtgttgatgtgactgcgtactttgacccagtcaagaccacaaaggacaaaatctactgcaagagaggaggtttcattcctgagtatgactttgatgcgcgtgagtttggtctcaacatgttccagatggaagattctgatgcgaatcagaccatctcacttctcaaggtcaaagaagcacttcaagatgctgggattgatgcacttggaaaggagaagaaaaacataggatgcgtgcttggcattggaggtggacagaagagttcacatgagttctacagcagactcaactatgtggttgtggagaaagtcttgagaaagatggggatgccagaggaagatgtcaaagtggctgtggagaagtacaaagcgaacttcccagaatggagacttgactctttccctggattccttgggaatgtcactgctggcagatgcaccaacacattcaacttggatggcatgaactgcgttgtggatgctgcatgtgcaagctccttgatagcagtcaaggttgcgattgatgaactgctctatggtgactgcgacatgatggtcactggtgcaacctgcacagacaactccattgggatgtacatggctttctcaaagacacctgtgttcagcacggacccaagtgtgagagcgtatgatgagaaaacgaaagggatgctcattggtgagggatcagccatgttggtgctcaaacgttatgcagatgcagtgagggatggtgatgagattcatgctgtgattcgtggttgtgcaagctcaagtgatggcaaagcagctggcatctacactcccacaatcagtggtcaagaggaagccttgagacgtgcatacaatcgtgcctgcgttgaccctgccactgtcactttggttgagggtcatgggactggcactccagttggagataggattgagttgactgcgttgaggaacttgtttgacaaagcgtatggtgaagggaacacagagaaagttgcagttggaagtatcaagtccagtattggtcatttgaaggctgttgctggtcttgctggaatgatcaaggtcatcatggctctcaaacacaagactttgcctggaacgatcaatgtggacaatccacccaatctctatgacaacactcccatcaatgagtcatccctctacatcaacacgatgaacagaccctggttccctccacctggtgttccgagacgtgctggaatatccagctttggctttggaggtgccaactaccatgcagtgttggaagaggctgaaccagagcacacgacagcgtacagactcaacaaacgtccacaaccggtgttgatgatggctgcaactcctgctgcgttgcagagcctttgtgaagctcagctgaaagagtttgaagctgcgatcaaggagaatgagacagtcaagaatactgcctacatcaagtgtgtcaagtttggagaacagttcaagttccctgggagcatacctgcgaccaatgcgagactgggattcttggtcaaagatgcggaggatgcgtgctccacgcttcgtgctatatgtgctcagtttgccaaagatgtgaccaaagaagcgtggaggcttccgagagaaggagtttctttccgtgccaaaggcattgccaccaatggtgctgttgctgcactcttctctggacaaggtgctcagtacacacacatgttcagtgaagttgcgatgaactggcctcagttcagacagtccattgctgcaatggacgctgcacagtccaaggttgctggaagtgacaaagactttgaaagagtctctcaagtcctgtacccaaggaaaccgtacgaacgtgagccagaacaagatcacaagaaaatctcactcacagcatacagccagccgtcaaccctggcatgtgctcttggtgcctttgagattttcaaggaagctggattcactccagactttgcagctggacacagcttgggtgagtttgctgcgctctatgcagctggttgtgttgacagagatgagttgtttgaacttgtttgcagaagggcaaggatcatgggaggcaaagatgcacctgccacacccaaaggttgcatggcagctgtcataggacccaacgcagagaacatcaaggttcaagctgccaacgtctggcttggaaactcaaactctccgtctcagactgtcattactgggtctgttgaagggattcaagctgaaagtgccagattgcagaaggaagggttcagagttgtgcctcttgcttgtgagtctgccttccattctccacagatggaaaatgccagctcagctttcaaagatgtcatatccaaggtttccttccgtacacccaaagcagaaacaaagctcttcagcaatgtttctggagagacctatccgacggatgccagagagatgctcactcaacacatgacctcatctgtgaagttcctgacccaagtgaggaacatgcaccaagctggtgcgagaatctttgttgagtttggaccgaaacaagttctcagcaaacttgtttctgaaaccctcaaagatgacccgtctgttgtcacagtgtctgtgaacccagcttctggcacggactctgacatacagttgagggatgctgcagttcagctggttgtggctggtgtcaatcttcaagggtttgacaagtgggatgctcctgatgccacgaggatgcaagccatcaagaaaaagagaaccacactcagactttcagctgccacctatgtcagtgacaagaccaagaaagtgagggatgctgccatgaacgacggaagatgtgtcacatacctcaagggtgctgcaccactcatcaaggctcctgaacctgtggttgacgaagctgccaagagggaggctgaaaggcttcagaaggagcttcaagacgctcagaggcagcttgacgacgccaaacgtgcagctgcagaagccaactccaaacttgctgctgccaaggaggaagccaagactgctgcagcttcagccaagcctgcagttgacactgctgttgtggagaaacatcgtgccatcctcaagtccatgctggctgagctggatggttatggaagtgttgatgcttcttcccttcagcaacagcaacagcaacagactgctccggcgcctgttaaagccgctgcccctgccgctcccgttgcaagtgctcctgctcccgccgtgtccaacgagttgcttgagaaagctgagacagttgtgatggaggttctcgctgccaagactggatacgaaacagacatgattgaggcggacatggagcttgagactgagttgggaattgacagcatcaagagggttgaaattctttctgaagtccaagctatgcttaacgttgaggcgaaagatgttgatgctctctctaggacgagaacagtgggtgaagttgtcaacgctatgaaggcagaaatcgctggttcttccgctccggcgccggcagctgccgcacctgcaccggctaaagcggctccagctgcagctgcaccagctgtttctaatgagctgctcgaaaaggcagaaactgttgtgatggaagtccttgctgccaaaactggctacgaaactgacatgatagaatcagacatggagcttgagacggagcttggaattgattccatcaagcgtgtggaaatcctcagtgaagtccaagccatgctcaatgtggaagctaaggatgtggatgctctctcaaggaccagaactgtcggtgaggttgtcaatgccatgaaggctgagatagctggaggctccgctcctgcgccggccgctgccgctcctggtcccgctgccgcggctccagctccagctgcagccgctccggccgtctcaaacgaactccttgaaaaagctgagaccgtcgtgatggaggtcttggcagctaaaaccggctatgagactgacatgattgagtctgacatggaattggagacagaacttgggatagacagcatcaaacgtgttgaaatcctcagtgaggtccaagctatgctgaacgtggaagcgaaggatgttgatgctctgtccagaacgaggaccgttggtgaggttgtggatgccatgaaggctgaaattgctggagggtctgcgcccgcgccagctgcagccgctcctgcacccgcagccgcggcacctgctccagctgcacctgcacctgccgtttcttcagaactcttggagaaggctgagacggttgtgatggaggttttggctgcaaagactggctatgagaccgacatgattgaatctgatatggaattggagacagagcttgggatcgattccatcaaaagagtggagatcctgagtgaagtccaagccatgctcaatgttgaagctaaggatgttgatgcactttcaagaacaaggacagtgggtgaggttgtggatgccatgaaggcggagattgctggagggagcgcgcctgcgccagctgccgcggcacctgcaccggcagccgcagctccagctccagctgcaccagcaccggccgcgcccgcgccagctgtttcatccgaactcctggaaaaggccgagacggttgtgatggaggtgctcgcagctaagactggttacgagaccgacatgattgaaagtgacatggagcttgaaaccgagttgggaatagatagcatcaaacgtgttgaaatcttgtctgaggtccaagctatgttgaacgtggaggcaaaagatgtcgatgcgctttcaagaaccagaacagtcggtgaggtcgtggacgccatgaaggctgaaattgccggaagctctgctagtgcgccagctgcagccgcacctgcacctgctgccgcggcacctgctccagctgcagccgctcctgccgtcagcaatgagttgctggagaaagccgaaacagttgtgatggaagtccttgctgcaaaaactggttacgaaacggacatgattgagtcagacatggaattggagaccgaacttggaatagattccatcaagagagtggagatcctctctgaggtgcaagccatgctcaacgttgaggctaaagatgttgatgcactcagtaggacaagaactgtgggggaagttgtcgatgcgatgaaggctgagattgctggaggctctgctcctgcgccggcagctgccgcacctgcacccgcagccgcggcaccagctgtcagcaacgaattgcttgagaaggctgaaacagttgtcatggaagtgctggctgcaaaaaccggctatgagactgacatgattgagtctgacatggaacttgagacggaattgggcattgacagcatcaagcgtgttgagatcctcagtgaagtccaagcaatgctcaatgtggaggctaaggatgtggatgccctctcaaggaccagaacagttggtgaggtcgttgatgcgatgaaggcggagatcgctggaagttccgcgcctgcgccagctgcagccgctcctgcacccgcagccgcggcaccggctccagctgcagccgcaccggccgtctcctcagaactcctggaaaaggctgagacagttgtgatggaagtccttgctgcgaaaactggctatgagaccgacatgattgaatctgacatggaactggagaccgagcttggaattgactccatcaaacgtgttgaaatcctctctgaggttcaagcgatgttgaatgtggaggccaaagatgttgatgctctttccagaacaaggacggtgggagaggtggttgatgccatgaaggctgagatagctgggggttctgctcctgcgccagctgcagccgctcctgctcccgctgccgcggcaccagctgtcagcaacgaactccttgaaaaagctgaaactgttgtgatggaggttttggctgcaaagactggatacgagactgacatgatagagtcagacatggagttggaaacagagcttgggattgatagcatcaagcgtgtggaaatcctttctgaggttcaagccatgctgaacgttgaggccaaagatgtcgatgctttgtcaaggaccagaacggttggagaagtggtcgatgccatgaaggctgagatagctggtggatcagcccctgctccggctgcagccgctcctgcaagtgccggtgctgcaccagctgtgaagattgattcagttcatggtgctgactgtgacgatttgtcactgatgcacgcaaaggtggttgacatcagaaggccagatgaactgattctggaaagaccggagaaccgtccagttcttgtcgttgacgatggctcagagttgacacttgctcttgtgagggtgttgggagcctgtgcagttgtcttgacctttgagggattgcagttggctcagagagctggtgcagctgccattcgtcatgttctggctaaggacctttcagcagaatcagctgagaaggccatcaaagaggctgagcaaagatttggagcgttgggaggcttcataagccagcaagcagaaaggtttgaaccagctgagatactgggtttcacactcatgtgtgcgaagtttgccaaagcctctctctgcactgctgtggctggaggtcgtcctgccttcatcggtgtggctaggcttgacggcagacttggattcacctctcaaggcacttctgacgcactcaagagagcacagcgtggagcgatctttggactctgcaagacaatagggttggagtggtcagaatctgatgtgttcagccgtggtgtggacattgctcaagggatgcacccagaagatgctgcagttgccatagttagggagatggcgtgtgctgacatcagaatcagagaggttgggattggagcaaaccagcaaagatgcacaatcagagctgccaagttggagactgggaaccctcagagacagatagcgaaagacgatgtgcttctggtttctggaggtgctcgtgggatcacacctctttgcatccgtgagatcacgcgtcagattgctggaggcaagtacattctgttgggtcgtagcaaagtttctgcgtctgaaccagcatggtgtgctggcatcactgatgagaaggctgtgcagaaagctgccacccaagagttgaagagggccttcagtgctggtgaaggacccaaacccactccaagggctgtcacgaaacttgtgggatctgttcttggtgctcgtgaagtgagaagctccattgctgccattgaagctctgggtggcaaagcgatctacagctcttgtgatgtgaactctgctgcagatgttgccaaagcagttagggatgcagagtcccagcttggtgccagagttagtggaatcgttcacgcttctggtgtgctccgtgatcgtctcatagagaagaaactccctgacgagtttgatgctgtctttgggaccaaagtcactgggttggagaatcttctggctgcagttgatcgtgccaacctcaaacacatggttctcttcagctcccttgctggtttccacggcaatgttggtcagtctgactatgcgatggcaaacgaagctctcaacaagatgggtttggaacttgcgaaggatgtcagtgtcaagtccatctgctttggtccctgggatggtgggatggtgacacctcaactcaagaaacagtttcaagaaatgggagttcagatcattcctcgtgaaggaggtgctgatacagttgcgaggattgtgttgggatcaagtcctgctgagatccttgttggaaactggaggacaccatccaagaaagttggaagtgacacgatcaccctgcatagaaagatcagtgccaagtccaatcccttcttggaggatcatgtcatacaaggcagaagggtgttgccaatgacccttgctattgggagccttgctgagacctgccttggactcttccctggctactctctctgggccatagatgacgcacagctcttcaaaggtgtcactgttgatggagacgtcaactgtgaagtgaccctcacaccgtccactgctccgagtgggagggtgaatgtccaagcgacgctcaagacgttctcaagtggaaaacttgttccagcctacagagctgtcatagtgttgtccaaccaaggtgctccacctgccaatgcaaccatgcagcctccgagccttgatgcagatcctgctttgcaagggtcagtctatgatggcaagactctctttcatggtcctgcgttcagaggcattgatgacgttctcagctgcaccaagagccagcttgttgccaagtgttctgctgttcctggatcagatgcagccagaggagagtttgcaactgacactgatgcacatgatccctttgtcaatgatcttgcctttcaagcaatgttggtctgggtgaggagaacgctgggacaagctgcactcccgaactccattcagaggatagtccaacacagaccggtcccacaagacaaacccttctacatcaccctcagatccaatcagagtggtggacatagccagcacaaacatgcacttcagttccacaacgaacaaggtgatctcttcattgatgttcaagcctctgtcattgcgacagactcacttgcgttctgagtagttagcttaatcacttaggtcacccagtccaagcccggcctagcacgatgatcatgagtgttgctattgatgtatgttaatactatacacagtcatcgtgtgtgttttataaaactgtaagcttaggatgtttgaggctaatgtaattagcactacaccgtaataaatgagaggtttactttatgttttaataatgttcttacccttgctgctctctaaactgtaatggcgtacggttagctaaactaaagtaaaaatcgattcgcttgagtaaaattagtgaccgggaaagatcatcgactactactgctcagagatgtaatcggtaattaagacttcaagctcaataattaattaggagtaaatctggcttcgaatttttaaattgtcaacttccaaagaaggattggcaagactcaatctcaattgcccaacaaacatatggctctttacaaatttggaatctctttttgatggcaagaacgtcgtaattcctctgtcgatctcatgtaattaccaaactcatctacttattactttctttatatgcacttactgatgcggccgcttaattaagatgagtgatactcaggactcaggactcactctgctgatcactagtgctagcctcgaggtcgacacaactttgtatacaaaagttgtctagacctaggctcagcaactcatccagtcaagttcgagtcagtgagttgggcggccgcagcttatagtaaagatttttttgttaataaaatgaaagttaatatttatggatttatttgaacatatttacaagtttttgttaataaatttatttacagaagtgttaaatttgaaaatgtgttaaatgagagttaatatttatggatataatattactttatttaaaaataaaatgaatttatattaaaatatgatttggtaaaagatattataaagaggaacttggatgagaaagacgacgatgggcaaaagttgcatggcacaccgcttttgttcagtaacatctgcactgtggcgcctttttcacactcaccatgcatgctgccacgtcagctttcacactatgacaccactggccatacacgttgccacctcagctttctcctcttctcactatgacacgactggccatgcatgcatgcatgctgccacctcagctcccgcctcttcacccgtgtctttctctcatgtcgcagtgctgcgtgccaacctcttctctctataaatagagagaagagaatgatggttaaactcaaaccaaaacaagaaaacatacacaaatagcaaaacggatccacaaccaaaaatggctgcaaggaacgtgagtgcggctcatgagatgcatgacgagaagaggatagctgttgtgggcatggctgttcagtatgctggatgcaaaacgaaagacgagttctgggaagttctcatgaatggaaaagttgagagcaaagtgatcagcgacaaacgtcttggttcaaattaccgtgctgaacactacaaagctgaaaggagcaagtatgctgacaccttctgcaatgagacatatggaactcttgatgagaacgaaatagacaatgagcatgaactccttttgaaccttgccaaacaagccttggctgaaacatctgtcaaagattcaacaagatgtggcatagtttctggatgcctcagcttcccgatggacaacctccaaggtgaactcttgaatgtgtaccagaaccatgttgagaagaaacttggtgccagagttttcaaagatgcctctcactggtcagaaagagaacagtccaacaaaccagaggctggtgacagaagaatcttcatggaccctgcttcctttgttgctgaggaactcaatcttggcgctctccactactctgttgatgctgcctgtgccactgcgctctatgtgctcagactggcgcaagatcacttggtctctggtgcagctgatgtgatgctttgtggtgcaacatgcctgccggagccgtttttcatactctctgggttctcaaccttccaagccatgcctgttggaacgggtcagaatgtgtccatgccgctgcacaaagattctcaaggattgacccctggtgaaggaggttccatcatggtcctcaaacgtttggatgacgcaatcagagatggagatcacatctatggaacacttttgggagccaatgtcagcaacagtggcactggtctgccacttaaaccccttttgccgtcagagaaaaagtgcctcatggacacctacacacgtatcaatgtgcatccccacaagattcagtatgttgaatgccatgcaactgggactccacaaggtgatcgtgtggaaattgatgctgtgaaggcttgctttgaaggcaaagtcccacgttttggaaccacaaaagggaactttggacacacattggtggcagctgggtttgctggcatgtgcaaagtgcttctctccatgaagcacgggatcattccacccactccgggaatagatgacgaaacgaagatggaccctctggttgtctctggtgaggccattccctggccagaaacgaatggagaaccgaagcgtgctggtctctcagcgtttggatttggtgggaccaatgctcatgctgtctttgaggaacatgacccaagcaatgctgcatgcactggccatgactccatttctgctctctctgcacgttgtggtggtgagtcaaacatgagaatagcaatcactgggatggatgccacttttggtgctttgaaaggattggatgcttttgaaagggccatctacactggtgctcatggtgctataccactcccagaaaagagatggagattcctggggaaagacaaggacttccttgatctttgtggagtcaaagcaacaccgcatggctgttacattgaagatgttgaagttgatttccagaggctgaggactccaatgactcctgaagatatgctcttgcctcaacagcttctggctgtcaccacaattgatagggccatattggactctggcatgaagaaaggtggaaatgtggctgtctttgtggggttggggaccgatcttgaactctaccgtcaccgtgcaagggttgctctcaaggagagagtgaggcctgaagccagcaagaaactcaatgacatgatgcagtacatcaatgattgtgggacaagcacttcttacaccagctacataggcaacttggttgcaacaagggtcagttcacaatggggcttcacgggaccttccttcacaatcacagaaggcaacaattctgtgtacagatgtgctgaacttggcaaatacctcttggaaacgggagaggttgatggggttgtggttgcgggtgttgatctctgtgggagtgctgagaacctttacgtcaagtcaaggcgtttcaaggtgtctacatctgacaccccgagagccagctttgatgcagctgctgatggttactttgttggagagggctgtggtgcatttgtgctcaagcgtgagacaagctgcaccaaggatgacagaatctatgcttgcatggatgccatagttcctggaaatgttccatctgcatgtttgagagaggcattggatcaagccagagtcaagcctggagacatcgagatgttggagctttctgctgattcagcgaggcatttgaaggacccgtctgttctcccaaaggaactcactgctgaggaagagattggcggacttcagacgattcttcgtgacgatgacaagctcccaaggaatgttgcaactggaagtgtcaaggccactgttggtgacactggttatgcttctggtgctgccagtttgattaaggctgcgctttgcatctacaaccgttacctgcccagcaatggagatgactgggatgaacctgcacctgaagcaccctgggacagcacactctttgcgtgccagacctcaagagcttggttgaagaaccctggtgagagacgttatgcggctgtttccggagtcagtgaaaccagaagttgctacagtgtgctgctttctgaagcagagggacactacgagagagagaacagaatcagtttggatgaggaagcacccaagctcattgtgttgagagcagactcccatgaagagattcttggaagattggacaagataagggaaaggttcttgcagcccacgggtgctgcacccagagagtctgaattgaaggcgcaagcccgtaggatctttcttgaactccttggtgagacccttgcccaagatgcagcttcatctggaagtcagaagccccttgctctcagcttggtctccactccatccaagctccagagagaggtggaacttgcggcaaaaggcattccgagatgtctcaagatgagacgtgattggagttcccctgctggaagcagatatgcgcctgagcctttggccagtgacagagttgccttcatgtatggagaaggaaggagcccttactatggcatcacacaagacattcataggatttggcctgaacttcatgaggtcatcaatgagaaaacaaaccgtctctgggctgaaggtgacagatgggtcatgccaagggccagcttcaagagtgagcttgagtcacaacagcaagagtttgacagaaacatgattgaaatgttccgtcttggaatcctcacctcaattgccttcacaaacctggcgagagatgttctcaacatcacgcccaaagcagcctttggactcagtttgggagagatttccatgatctttgctttctccaagaaaaacggtttgataagcgatcagttgacaaaggatttgagagagtcagatgtctggaacaaagctctggctgttgagttcaatgcgctcagagaagcctggggcattccacagtctgtcccaaaagatgagttctggcaaggttacatagtgaggggaacgaaacaagacatagaagcagccatagcaccagactcaaagtatgtgaggttgaccatcatcaatgatgccaacactgctctcatcagtggaaagcctgatgcatgcaaagctgcgattgctcgtcttggtggcaacatccctgcgcttccagtcactcaaggcatgtgtgggcattgcccagaggtgggaccttacaccaaggacatcgcaaagatccacgccaaccttgagttccctgtggttgatggtcttgatctctggactaccataaaccagaagaggcttgtgccaagagccacgggtgccaaagatgaatgggctccttcatcctttggggagtatgctggacagctctatgagaaacaagccaacttccctcagatagttgaaaccatctacaagcagaactatgatgtgtttgttgaagttgggccaaacaatcacagaagcacagcagtgagaaccacgcttggaccacagagaaaccaccttgctggtgccatagacaagcagaacgaggatgcttggacgacaatagtcaagctcgtggcttcattgaaggctcaccttgttcctggagtgaccatcagtccgctctaccactccaagctcgttgcagaggctgaggcttgttatgctgcgctctgtaaaggtgagaaacccaagaaaaacaagtttgtgagaaagattcagttgaatggcagattcaacagcaaggcagaccccatctcctcagcagaccttgcatccttcccacctgcggaccctgcgattgaagctgccatctcttcaaggatcatgaagcctgtggctccgaaattctatgcgcgtctcaacattgatgagcaagatgagaccagagatccgatcttgaacaaggacaatgcgccttccagctccagctcttccagcagttcctcttccagcagttcatctccgtctcctgctccttcagctccagttcagaagaaagctgccccagctgcggagacaaaagctgttgccagtgctgatgcacttcgtagtgccctgcttgatcttgactccatgcttgcgctcagctctgcaagtgcttctggcaaccttgttgagactgcgccatctgatgccagtgtcattgtccctccgtgcaacattgctgatcttggcagcagagctttcatgaaaacttatggtgtttctgcgcctctgtacaccggtgcaatggccaagggaattgcctctgcggacttggtgatcgcagctggaaggcaaggaatccttgcgtcatttggtgctggaggccttccaatgcaagttgtgcgtgagtccattgaaaagattcaagctgccctgcccaatggaccatatgctgtcaacctcatccattctccttttgacagcaaccttgagaagggaaatgttgatctcttcttggaaaagggtgtcacttttgttgaggcttcagccttcatgacgttgacaccgcaagttgtcagatacagagcggctgggttgacgaggaatgcagatgggtcagtcaacataaggaacagaatcattgggaaagtctccagaactgagctggctgaaatgttcatgcgtcctgcacctgagcatcttttgcagaagctcattgcttctggggagatcaatcaagaacaagctgagttggccagacgtgttcctgtggctgatgacattgcggttgaagctgattctggtggacacactgacaaccgtccaatccatgtcattctgcctctgattatcaacctgagggataggcttcacagagagtgtggatacccagcaaacctgagggttcgtgttggtgctgggggtggcattgggtgtccccaagctgcgctggcaactttcaacatgggtgcctctttcattgtcactggaacagtgaaccaagttgccaaacaatctgggacgtgtgacaatgtgaggaaacagcttgcgaaagcaacttactcagatgtttgcatggcaccggcagctgacatgtttgaggaaggtgtgaaacttcaagttttgaagaaaggaacaatgttcccttcaagagccaacaaactctatgagttgttctgcaagtatgattcttttgagtccatgcctccagcagagcttgcgagggttgagaaaagaatcttcagtcgtgcattggaagaggtctgggatgagaccaagaacttctacatcaaccgtctccacaacccagagaagatacagagggctgagagggaccccaaactgaagatgtcactgtgtttcagatggtatctgtccctggcttcaaggtgggccaacactggagcttctgacagagtcatggactaccaagtttggtgtggtcctgccattggttcattcaatgatttcatcaaaggaacttaccttgatccggcagtggcaaatgagtacccgtgtgttgtgcagatcaacaaacagattcttagaggagcgtgcttcttgaggcgtcttgaaatactgagaaatgcaaggctttcagatggtgcagctgcacttgtggcgagcattgatgacacatatgtccctgctgagaagctgtgagtagttagcttaatcacttaggtcacccagtccaagcccggcctagcacgatgatcatgagtgttgctattgatgtatgttaatactatacacagtcatcgtgtgtgttttataaaactgtaagcttaggatgtttgaggctaatgtaattagcactacaccgtaataaatgagaggtttactttatgttttaataatgttcttacccttgctgctctctaaactgtaatggcgtacggttagctaaactaaagtaaaaatcgattcgcttgagtaaaattagtgaccgggaaagatcatcgactactactgctcagagatgtaatcggtaattaagacttcaagctcaataattaattaggagtaaatctggcttcgaatttttaaattgtcaacttccaaagaaggattggcaagactcaatctcaattgcccaacaaacatatggctctttacaaatttggaatctctttttgatggcaagaacgtcgtaattcctctgtcgatctcatgtaattaccaaactcatctacttattactttctttatatgcacttactgatgcggccgcttaattaatctgacctgaccactagacctgagtgagtacagatgtgctactagtgctagcctcgaggtcgaccaacttttctatacaaagttgtctagacctaggactaggcactgagtgactcactgacctgactgagtgactggcggccgcagcttatagtaaagatttttttgttaataaaatgaaagttaatatttatggatttatttgaacatatttacaagtttttgttaataaatttatttacagaagtgttaaatttgaaaatgtgttaaatgagagttaatatttatggatataatattactttatttaaaaataaaatgaatttatattaaaatatgatttggtaaaagatattataaagaggaacttggatgagaaagacgacgatgggcaaaagttgcatggcacaccgcttttgttcagtaacatctgcactgtggcgcctttttcacactcaccatgcatgctgccacgtcagctttcacactatgacaccactggccatacacgttgccacctcagctttctcctcttctcactatgacacgactggccatgcatgcatgcatgctgccacctcagctcccgcctcttcacccgtgtctttctctcatgtcgcagtgctgcgtgccaacctcttctctctataaatagagagaagagaatgatggttaaactcaaaccaaaacaagaaaacatacacaaatagcaaaacggatccacaaccaaaaatggcgcttcgtgtcaagaccaacaagaagccatgttgggagatgaccaaggaggaactgacctctggcaaaactgaggtgttcaactatgaggaactcctggagtttgcagagggtgacatagctaaggtttttggtccggagtttgctgtcatagacaagtaccccagaagggtgaggctgcctgctcgtgaatacctgcttgtgacaagggtcacactcatggatgccgaggtcaacaactacagagttggtgccagaatggtcactgagtatgatcttccagtgaatggcgaattgtctgagggaggtgattgtccctgggcagttctggttgagagtggacagtgcgatttgatgctgatatcatacatgggaattgatttccagaaccaaggtgacagagtttaccgtctgctcaacaccacgttgacattctatggggttgcccatgagggagagacccttgagtatgacatcagagtgaccggttttgccaaacgtttggatggtggcatctccatgttcttctttgagtatgactgctatgtcaatgggaggcttctcattgagatgagagatggctgtgctggcttcttcacaaatgaggagcttgatgcgggaaagggtgtggtgttcacaagaggggatttggctgccagagctaagattccaaagcaagatgtttctccctatgctgtcgctccctgccttcacaaaacaaaactcaacgaaaaggagatgcagaccttggttgacaaagattgggcttccgtttttggctcaaagaatggcatgccggagatcaactacaaactctgcgcacgtaagatgctcatgattgatagagtcaccagcattgaccataagggaggtgtgtacggtttgggtcagttggttggtgagaaaatcttggagagggaccattggtacttcccatgccattttgttaaggatcaagtcatggctggatctcttgtcagcgacggttgttcacaaatgctcaagatgtacatgatctggctcggtttgcaccttaccaccggaccatttgacttcagacccgtcaacggacacccgaacaaagttaggtgtaggggtcagatatctcctcataagggaaagttggtctacgtcatggagatcaaagagatgggattcgacgaggataacgatccgtacgccattgctgacgtcaacatcattgacgttgatttcgaaaagggtcaagatttcagccttgatagaatcagcgactacggaaagggggatcttaacaaaaagatcgtcgtggacttcaagggcattgctctcaagatgcagaagagatccacgaacaagaacccctccaaagttcagcccgtttttgctaacggtgcagccactgtgggaccggaagcgtccaaggccagctctggtgccagtgctagtgcttctgctgcccctgcgaagcctgctttctcagcagatgttcttgcgccaaagccagttgcacttcctgaacatatcctcaagggtgacgctctcgctccgaaagaaatgtcctggcatcccatgtcaaaacttcctggcaacccgacgccgttcttctcccctagttcttaccctccgagggcaatttgcttcatccctttccctggcaacccacttgacaacaattgcaaagctggagaaatgcctctgaactggtacaacatgtcagagttcatgtgtggaaaagttagcaactgcttgggaccagagttcgcaagatttgataagtcaaatacgagcagaagccctgcttttgatttggctcttgtgactagagttgttgaagtcacaaacatggaacatggcaagttcctgaatgttgattgcaatcccagcaaaggcacaatggtgggggagtttgactgtcctcaagatgcgtggttctttgatggttcttgcaatgatgggcacatgccttattccatcatcatggaaatcggacttcagacatccggtgttctcaccagtgtgttgaaagcaccactgacgatggacaaagatgacattctctttaggaaccttgatgcaagtgctgaaatggtgaggccagatgtggatgtgagggggaaaaccataaggaatgtgaccaagtgcactggatatgcaatgttgggaaagatggggattcacagattcacgtttgagttgtctgttgatggcgtggttttctacaaaggaagcacttcctttggatggttcactccagaggtgtttgctcagcaagctggacttgacaatgggaaaaagacggagccttggtgcaaaactaacaacacgagtgtgagaagagttgaaatcgcatcagccaaaggcaaagaacagctgactgagaaacttccagatgcaactaatgctcaagttctcagaaggtcagaacagtgtgagtatttggattacctcaacattgctcctgattctgggctgcatgggaaaggatatgcgcatggacacaaagatgttaacccacaagactggttcttctcttgtcacttttggtttgatcctgtgatgcctggatctttgggaattgagtcaatgttccagctcattgaggcatttgcggtggaccagaacataccgggagaatacaatgtgagcaatccgacctttgcccatgcccctggaaaaacggcgtggaagtaccgtggtcaattgacaccaaagaaccgtgcgatggactgtgaggtgcacatagtttcaatcacagcctctcctgaaaatggaggctacgttgacatagtggcagatggagcactttgggttgatggtctccgtgtgtatgaagccaaagaactcagagttcgtgttgtcagtgcaaaacctcaagccattccggatgttcaacaacagccacccagcgcaaaagcggaccctgggaaaactggagttgcactcagtccgactcagttgagagatgtcctgcttgaagtggacaatccattgtatcttggtgttgaaaactccaatttggtgcagtttgaatccaaacctgcaacttcttcaaggattgtcagtatcaaaccatgctccataagtgatcttggtgacaagtccttcatggaaacgtacaatgtgtcagcacctctgtacactggagcaatggccaagggaattgcgtctgcggaccttgtcattgctgctgggaagaggaagatattgggttcttttggagcgggtgggcttccaatgcaccatgtgagggcagctttggagaagatacaagcggctctgcctcaaggaccatatgctgtgaacctcattcattcaccttttgacagcaacttggaaaaggggaatgttgatctcttcctcgaaaagggcgttactgtggtggaggcttctgcattcatgaccctcactccccaagttgttcgttaccgtgcagccggactctcaaggaacgctgatgggagtgtcaacatcagaaaccgtatcattggaaaagtgtccagaacagaactcgccgaaatgttcatcagaccggctccggaacacctccttgagaaactcatagcttctggtgagataacacaagaacaagccgaacttgcccgtcgtgttcctgtcgcagacgacatcgctgttgaagctgattctggtggtcacactgacaaccgtcccatccacgtcatcttgcctttgatcatcaaccttaggaacagactgcacagagagtgtggttatcctgcgcaccttagagtcagagttggagctggaggcggtgttggctgcccacaagctgctgcggctgccctcacaatgggagctgccttcatagtgactgggactgtcaatcaagttgctaaacagtccgggacatgtgacaacgtgagaaaacaactcagtcaagccacctacagtgacatttgcatggctccagcagctgatatgtttgaggaaggtgtgaaactccaagttctcaagaagggaacaatgttcccatcaagagctaacaaattgtacgaactcttttgcaagtacgactctttcgattcaatgcctcctgctgaacttgaaaggatcgagaagaggatcttcaagagggcacttcaagaggtctgggaagagaccaaggacttttacatcaatggtttgaagaatccagagaagatacagagagcggaacatgaccccaaactcaagatgtctttgtgtttcagatggtatcttggtcttgcatcacgttgggccaacatgggtgctcctgatcgtgtcatggactatcaagtctggtgtggtccagccattggagccttcaatgacttcatcaaaggaacatatcttgatcctgctgtctctaatgagtacccatgtgttgtccagatcaaccttcagattttgcgtggtgcatgttacctgaggcgtcttaatgctctgagaaatgatccgaggattgatcttgagactgaagatgctgcctttgtctatgagccaacgaatgcgctttgagtagttagcttaatcacttaggtcacccagtccaagcccggcctagcacgatgatcatgagtgttgctattgatgtatgttaatactatacacagtcatcgtgtgtgttttataaaactgtaagcttaggatgtttgaggctaatgtaattagcactacaccgtaataaatgagaggtttactttatgttttaataatgttcttacccttgctgctctctaaactgtaatggcgtacggttagctaaactaaagtaaaaatcgattcgcttgagtaaaattagtgaccgggaaagatcatcgactactactgctcagagatgtaatcggtaattaagacttcaagctcaataattaattaggagtaaatctggcttcgaatttttaaattgtcaacttccaaagaaggattggcaagactcaatctcaattgcccaacaaacatatggctctttacaaatttggaatctctttttgatggcaagaacgtcgtaattcctctgtcgatctcatgtaattaccaaactcatctacttattactttctttatatgcacttactgatgcggccgcttaattaatcacgagtggatgactgtcacgactgactcatgactgactactagtgctagcctcgaggtcgacacaactttgtataataaagttgtctagacctaggcgagtcatgagtcgtgacatgacgtcatgctcatcagactgcggccgcagcttatagtaaagatttttttgttaataaaatgaaagttaatatttatggatttatttgaacatatttacaagtttttgttaataaatttatttacagaagtgttaaatttgaaaatgtgttaaatgagagttaatatttatggatataatattactttatttaaaaataaaatgaatttatattaaaatatgatttggtaaaagatattataaagaggaacttggatgagaaagacgacgatgggcaaaagttgcatggcacaccgcttttgttcagtaacatctgcactgtggcgcctttttcacactcaccatgcatgctgccacgtcagctttcacactatgacaccactggccatacacgttgccacctcagctttctcctcttctcactatgacacgactggccatgcatgcatgcatgctgccacctcagctcccgcctcttcacccgtgtctttctctcatgtcgcagtgctgcgtgccaacctcttctctctataaatagagagaagagaatgatggttaaactcaaaccaaaacaagaaaacatacacaaatagcaaaacggatccacaaccaaaaatgcccactccagatgccactgcgcctctcaacaagccgtcagactatgctgtgtaccacgaagaggatggtcctttctggactgctgattcctctggtgtcagcagagtgaacttctctgaaactggtgtgggatctgaaggtgtcattcctgcgctcacactgattgatgtgtttgagcgtgcggtcaaacgtggtggcaataggattgcattcagaacagagaacatgccaaccttgaggcgtggagaagaggctcctgatgctttgccgctcaaagattggaagtcctggtcttggaaacagtacaaagctgatgttcacagaattgcgagggctctgatggatttgggagttgagcagcacgatgcggtctccatctttggcttcaactcaccagaatggttcctcagtgctgtcggtgcagttcatgctggtgccaagatcgctggaatctacccttcagacactcctgctcaagtgcagtacaaagccttccactctgacactgctgttgcagttgtggagaacgaacagtgcttcaagaaattcgcagaggtggttgaggatctcccttacctcaaagccattgtttgttgggattatgaagccacagacatcacaagggaagatggttcagtggttgaagtcctgacctttgctgagttcctgaagagaggtgacactgtggaagcagctgcacttgatgagagaatcagcaagattgagcccaccatgtgtgctgccctgatctacaccagtggcacaactgggagacccaaagctgtcatgatctcccatgacaaccttgtctttgaagcatctgctgtggtcccgaacttgggaggggcatgcacgaccactgctgaggaaaggattctttcctaccttcctttgtctcatgttgctggaatgatggttgacatcattgctccaatcatagcgacagcgttccacaaaggaaggatctgtgtttgttttgccagaccgtatgatttgagaactggaacccttgggcaaagactcaatgcagtggagccaaccatattccttggtgtgccacgtgtgtgggaaaagatccaagagaaattgatggctgttggtgccaaaaccactggtctcaagaagaaactcagcacggcagccaagaaacgtgggcttgaatttcaagaggaacaacagatagggagaagtggtgccaaccctggctttggaccgcttggaatctacaagaaacttttgggcctcatcaaaggaaagttggggctgaccaaatgcaagtttgcctttgctggcgcagctccaatgacccgtgaaacccttcagtactttggagcgctgaacatcaacatcaatgaggtctatggaatgtctgaatgcagtggggctgccacctggtcaactgacaaagctcatgagtggggcactgttggctatgagatgccctcctgtgaagtcagagtgttcaagattgcggaggatggcaccaagacagagtgcccaagagctgctgacatcatgcatgccacagaagaggaacaaggtgaagtttgcttccgtggaaggaacatcatgatgggatacttggccaacccgaaacttggtgatgaccatgttgctgagattgaagagaagaatgcagctgccatagatagcgaagggtggcttcactctggtgacaagggagcaatttccacaaggggaatgctcaagataacgggcagatacaaggagcttatcataggtgctggtggggagaatgtggctcctgttcccattgaagatgccatcaaggcgaggatgccttttgtttcaaatgcaatgatggttggagacaagaggaagttcatggctgtccttctgactttgaaaacggttggagcaactggagagcttcctggcacaaacaagctcatgggagcagctgcggactatggtgagaccattgaggatgcctgtgacaatgaggcgctcattgaagagataacgcagcaactcaaagagataggtgacgatggagatgtcacgccaagcaatgcagcccgtatacaaaagttcacgattttgccactcgacttcagtgtctccacagatgaactgacagcaacgttgaaattgaagagaagtgtggttgcagacaagtatgaggacatcatagaggctttctatgagagcaagtctgtctttgtgccttactcaacagttggagcttatgcaacgggtggaccagttgatgactctgttgtggatggatcattcaaaggtgactttagcatgattggggatgacgatccggatcttcagaatgtggatgtccttgaagcaattgatgaggacaactgagtagttagcttaatcacttaggtcacccagtccaagcccggcctagcacgatgatcatgagtgttgctattgatgtatgttaatactatacacagtcatcgtgtgtgttttataaaactgtaagcttaggatgtttgaggctaatgtaattagcactacaccgtaataaatgagaggtttactttatgttttaataatgttcttacccttgctgctctctaaactgtaatggcgtacggttagctaaactaaagtaaaaatcgattcgcttgagtaaaattagtgaccgggaaagatcatcgactactactgctcagagatgtaatcggtaattaagacttcaagctcaataattaattaggagtaaatctggcttcgaatttttaaattgtcaacttccaaagaaggattggcaagactcaatctcaattgcccaacaaacatatggctctttacaaatttggaatctctttttgatggcaagaacgtcgtaattcctctgtcgatctcatgtaattaccaaactcatctacttattactttctttatatgcacttactgatgcggccgcttaattaatctgatcatggatgctacgtcacggcagtacaggactatcactagacctaggagctgtgctgggtaactcacatgagtcactggtcacatcagcggccgcagcttatagtaaagatttttttgttaataaaatgaaagttaatatttatggatttatttgaacatatttacaagtttttgttaataaatttatttacagaagtgttaaatttgaaaatgtgttaaatgagagttaatatttatggatataatattactttatttaaaaataaaatgaatttatattaaaatatgatttggtaaaagatattataaagaggaacttggatgagaaagacgacgatgggcaaaagttgcatggcacaccgcttttgttcagtaacatctgcactgtggcgcctttttcacactcaccatgcatgctgccacgtcagctttcacactatgacaccactggccatacacgttgccacctcagctttctcctcttctcactatgacacgactggccatgcatgcatgcatgctgccacctcagctcccgcctcttcacccgtgtctttctctcatgtcgcagtgctgcgtgccaacctcttctctctataaatagagagaagagaatgatggttaaactcaaaccaaaacaagaaaacatacacaaatagcaaaacggatccacaaccaaaaatgcttcagcacacttggcttccgaagcctcccaatctgaccctcttgtcagatgaggttcatctctggaggattcctcttgaccagcctgagtcacaacttcaagaccttgctgccaccctgagcagtgatgaattggcgagggcaaacagattctactttccagaacacagaaggcgtttcactgctgggagaggcatcctcagatccatcttgggtggatacttgggagtggaaccgggtcaagtcaagtttgattatgagtcccgtgggaaaccgatccttggtgacagatttgctgagagtggactcctgttcaacttgtctcacagccagaaccttgccttgtgtgctgtcaactacacgcgtcaaataggcattgatcttgaatatctgcgtccaacatctgacttggagtctcttgcaaagaggttctttctcccaagagaatatgaactcttgaggtcactccctgatgagcagaaacagaagattttctttcgttactggacttgcaaagaggcttatctcaaagcaacgggagatggaatagccaaacttgaagagatcgagatagcactcaccccaacagaacctgccaagctccaaacagctcctgcgtggtctctgttggagcttgtgccagatgacaattgtgttgcagctgtggctgttgcgggttttggttggcagcccaagttctggcattactgagtagttagcttaatcacttaggtcacccagtccaagcccggcctagcacgatgatcatgagtgttgctattgatgtatgttaatactatacacagtcatcgtgtgtgttttataaaactgtaagcttaggatgtttgaggctaatgtaattagcactacaccgtaataaatgagaggtttactttatgttttaataatgttcttacccttgctgctctctaaactgtaatggcgtacggttagctaaactaaagtaaaaatcgattcgcttgagtaaaattagtgaccgggaaagatcatcgactactactgctcagagatgtaatcggtaattaagacttcaagctcaataattaattaggagtaaatctggcttcgaatttttaaattgtcaacttccaaagaaggattggcaagactcaatctcaattgcccaacaaacatatggctctttacaaatttggaatctctttttgatggcaagaacgtcgtaattcctctgtcgatctcatgtaattaccaaactcatctacttattactttctttatatgcacttactgatgcggccgcttaattaactactgtcactgaggccgtagacgagtacggactgatctaactagtgctagcctcgaggtcgacacccagctttcttgtacaaagtggttgcggccgcttaattaaatttaaattcaattaatgcaatcttgattttcaacaacgaaggtaatggcgtaaaagaaaaaatgtatgttattgtattgatctttcatgatgttgaagcgtgccataatatgatgatgtataattaaaatattaactgtcgcattttattgaaatggcactgttatttcaaccatatctttgattctgttacatgacacgactgcaagaagtaaataatagacgccgttgttaaagaattgctatcatatgtgcctaactagagggaatttgagcgtcagacctaatcaaatattacaaaatatctcactctgtcgccagcaatggtgtaatcagcgcagacaaatggcgtaaagatcgcggaaaaacctccccgagtggcatgatagctgcctctgtattgctgatttagtcagccttatttgacttaagggtgccctcgttagtgacaaattgctttcaaggagacagccatgccccacactttgttgaaaaacaaattgcctttggggagacggtaaagccagttgctcttcaataaggaatgtcgaggaggcaatgtaaccgcctctggtagtacacttctctaatccaaaaatcaatttgtattcaagataccgcaaaaaacttatggtttaaaccctgcaggactagtccagaaggtaattatccaagatgtagcatcaagaatccaatgtttacgggaaaaactatggaagtattatgtaagctcagcaagaagcagatcaatatgcggcacatatgcaacctatgttcaaaaatgaagaatgtacagatacaagatcctatactgccagaatacgaagaagaatacgtagaaattgaaaaagaagaaccaggcgaagaaaagaatcttgaagacgtaagcactgacgacaacaatgaaaagaagaagataaggtcggtgattgtgaaagagacatagaggacacatgtaaggtggaaaatgtaagggcggaaagtaaccttatcacaaaggaatcttatcccccactacttatccttttatatttttccgtgtcatttttgcccttgagttttcctatataaggaaccaagttcggcatttgtgaaaacaagaaaaaatttggtgtaagctattttctttgaagtactgaggatacaacttcagagaaatttgtaagtttgtaggtaccagatctggatcccaaaccatgtctccggagaggagaccagttgagattaggccagctacagcagctgatatggccgcggtttgtgatatcgttaaccattacattgagacgtctacagtgaactttaggacagagccacaaacaccacaagagtggattgatgatctagagaggttgcaagatagatacccttggttggttgctgaggttgagggtgttgtggctggtattgcttacgctgggccctggaaggctaggaacgcttacgattggacagttgagagtactgtttacgtgtcacataggcatcaaaggttgggcctaggatctacattgtacacacatttgcttaagtctatggaggcgcaaggttttaagtctgtggttgctgttataggccttccaaacgatccatctgttaggttgcatgaggctttgggatacacagcccggggtacattgcgcgcagctggatacaagcatggtggatggcatgatgttggtttttggcaaagggattttgagttgccagctcctccaaggccagttaggccagttacccaaatctgagtagttagcttaatcacctagagctcgatcggcggcaatagcttcttagcgccatcccgggttgatcctatctgtgttgaaatagttgcggtgggcaaggctctctttcagaaagacaggcggccaaaggaacccaaggtgaggtgggctatggctctcagttccttgtggaagcgcttggtctaaggtgcagaggtgttagcgggatgaagcaaaagtgtccgattgtaacaagatatgttgatcctacgtaaggatattaaagtatgtattcatcactaatataatcagtgtattccaatatgtactacgatttccaatgtctttattgtcgccgtatgtaatcggcgtcacaaaataatccccggtgactttcttttaatccaggatgaaataatatgttattataatttttgcgatttggtccgttataggaattgaagtgtgcttgaggtcggtcgccaccactcccatttcataattttacatgtatttgaaaaataaaaatttatggtattcaatttaaacacgtatacttgtaaagaatgatatcttgaaagaaatatagtttaaatatttattgataaaataacaagtcaggtattatagtccaagcaaaaacataaatttattgatgcaagtttaaattcagaaatatttcaataactgattatatcagctggtacattgccgtagatgaaagactgagtgcgatattatggtgtaatacataggaattcgtttaaacgatctgcgtctaattttcggtccaacttgcacaggaaagacgtcgaccgcggtagctcttgcccagcagactgggcttccagtcctttcgctcgatcgggtccaatgttgtcctcagctgtgaaccggaagcggacgaccaacagtggaagaactgaaaggaacgagccgtctataccttgatgatcggcctctggtgaagggtatcatcgcagccaagcaagctcatgaaaggctgatgggggaggtgtataattatgaggcccacggcgggcttattctttagggaggatctatctcgttgctcaagtgcatggcgcaaagcagttattggagtgcggattttcgttggcatattattcgccacgagttagcagacgaagagaccttcatgaacgtggccaaggccagagttaagcagatgttacgccctgctgcaggcctttctattatccaatagttggttgatctttggaaagagcctcggctgaggcccatactgaaagagatcgatggatatcgatatgccatgttgtttgctagccagaaccagatcacatccgatatgctattgcagcttgacgcagatatggaggataagttgattcatgggatcgctcaggagtagctcatccatgcacgccgacaagaacagaaattccgtcgagttaacgcagccgcttacgacggattcgaaggtcatccattcggaatgtattagtttgcaccagctccgcgtcacacctgtcttcatttgaataagatgttagcaattgtttttagctttgtcttgttgtggcagggcggcaagtgcttcagacatcattctgttttcaaattttatgctggagaacagcttcttaattcctttggaaataatagactgcgtcttaaaattcagatgtctggatatagatatgattgtaaaataacctatttaagtgtcatttagaacataagttttatgaatgttcttccattttcgtcatcgaacgaataagagtaaatacaccttttttaacattacaaataagttcttatacgttgtttatacaccgggaatcatttccattattttcgcgcaaaagtcacggatattcgtgaaagcgacataaactgcgaaatttgcggggagtgtcttgagtttgcctcgaggctagcgcatgcacatagacacacacatcatctcattgatgcttggtaataattgtcattagattgtttttatgcatagatgcactcgaaatcagccaattttagacaagtatcaaacggatgtgacttcagtacattaaaaacgtccgcaatgtgttattaagttgtctaagcgtcaatttga

SEQ ID NO: 12 - DNA, 20 bp, Artificial sequence
  Sz ORFA v3 Forward Primer
cacaaccggtgttgatgatg

SEQ ID NO: 13 - DNA, 20 bp, Artificial sequence
  Sz ORFA v3 Reverse Primer
gagcttcacaaaggctctgc

SEQ ID NO: 14 - DNA, 20 bp, Artificial sequence
  Sz ORFB v3 Forward Primer
gaatccttgcgtcatttggt

SEQ ID NO: 15 - DNA, 20 bp, Artificial sequence
  Sz ORFB v3 Reverse Primer
caatggactcacgcacaact

SEQ ID NO: 16 - DNA, 22 bp, Artificial sequence
  hThSzORFCv3 Forward Primer
ggattacctcaacattgctcct

SEQ ID NO: 17 - DNA, 19 bp, Artificial sequence
  hThSzORFCv3 Reverse Primer
tgtccatgcgcatatcctt

SEQ ID NO: 18 - DNA, 21 bp, Artificial sequence
  SzACS2 v3 Forward Primer
agaaattgatggctgttggtg

SEQ ID NO: 19 - DNA, 19 bp, Artificial sequence
  SzACS2 v3 Reverse Primer
ctgccgtgctgagtttctt

SEQ ID NO: 20 - DNA, 20 bp, Artificial sequence
  NoHetI v3 Forward Primer
ccagaacacagaaggcgttt

SEQ ID NO: 21 - DNA, 21 bp, Artificial sequence
  NoHetI v3 Reverse Primer
tcccaagtatccacccaagat

SEQ ID NO: 22 - DNA, 29 bp, Artificial sequence
  PAT v5 Forward Primer
acaagagtggattgatgatctagagaggt

SEQ ID NO: 23 - DNA, 29 bp, Artificial sequence
  PAT v5 Reverse Primer
ctttgatgcctatgtgacacgtaaacagt

SEQ ID NO: 24 - DNA, 29 bp, Artificial sequence
  PAT v5 Probe
ccagcgtaagcaataccagccacaacacc

SEQ ID NO: 25 - DNA, 24 bp, Artificial sequence
  GMS116 Forward Primer
gtaatatgggctcagaggaatggt

SEQ ID NO: 26 - DNA, 23 bp, Artificial sequence
  GMS116 Reverse Primer
atggagaagaacattggaattgc

SEQ ID NO: 27 - DNA, 23 bp, Artificial sequence
  GMS116 Probe
ccatggcccggtaccatctggtc

SEQ ID NO: 28 - DNA, 240 bp, Arabidopsis thaliana
  Ribulose Bisphosphate Carboxylase small chain 1A
atggcttcctctatgctctcttccgctactatggttgcctctccggctcaggccactatggtcgctcctttcaacggacttaagtcctccgctgccttcccagccacccgcaaggctaacaacgacattacttccatcacaagcaacggcggaagagttaactgcatgcaggtgtggcctccgattggaaagaagaagtttgagactctctcttaccttcctgaccttaccgattccgaa

SEQ ID NO: 29 - DNA, 105 bp, Artificial sequence
  Acyl-ACP Thioesterase Transit Peptide
atgcttaagctctcttgtaacgttaccaatcatcttcacacattctcattctttagcgattctagtctgttcatccctgtcaacagaaggactcttgctgtgtct

SEQ ID NO: 30 - DNA, 2346 bp, Artificial sequence
  SzACS-2 v4 gene
atggctcccactcccgacgccaccgcgcctctgaacaagccgagcgactatgccgtctaccacgaggaagacggccccttctggaccgccgattccagcggcgtctcgcgcgtgaactttagcgagaccggcgtgggatccgagggcgtcatccctgcgctcacgctcatcgacgtcttcgagagggccgtcaagcgcggcggaaacaggatcgccttccgcacggaaaacatgcccacgctccgccgcggcgaagaggccccggacgcgctgccgctcaaggactggaagtcctggtcctggaaacagtacaaggccgacgtccaccgcatcgccagggctctcatggacctcggcgttgagcagcacgacgccgtctcgatttttggctttaactcgcccgaatggtttctcagtgccgtcggcgccgtgcacgcaggtgccaagattgccggtatttacccctcagacacgcccgcccaggtccagtacaaggccttccacagtgacaccgctgttgccgttgtcgaaaacgagcagtgcttcaagaagttcgccgaggtcgtcgaggaccttccttacctcaaggccattgtttgctgggactatgaagccacagacatcacgcgcgaggacggctccgtcgtcgaggtcctcacctttgccgagttcctcaagcgcggcgacaccgtcgaggcggccgcccttgacgagcgcatctccaagatcgagcccaccatgtgcgctgcccttatttacaccagcggtactaccggccgccccaaggccgttatgatttcgcacgacaaccttgttttcgaggccagcgccgtcgtccccaacctcggaggagcctgtacgaccactgctgaggagcgcattctctcgtacctgcctctctcgcacgtcgctggtatgatggttgatattattgcccccatcattgccaccgccttccacaagggccgcatctgcgtctgctttgctcgcccgtacgatttgcgcaccggcacgctgggccagcgcctcaacgccgtggagcccaccatcttccttggcgtgccccgtgtgtgggaaaagattcaggaaaagctcatggccgtcggtgccaaaaccaccggcctcaagaagaagctctctacggccgccaagaagcgtggtcttgaattccaggaggagcagcaaatcggccgctccggtgccaaccctggctttggcccccttggcatctacaagaagctcctcggcctcatcaagggcaagctgggcctcaccaagtgcaagtttgcctttgctggtgccgcgcccatgacccgtgagacccttcagtactttggcgcgctgaacatcaacattaacgaggtctacggcatgtcagagtgctccggtgccgccacctggtccacggacaaggcccacgagtggggcactgttggctacgagatgcccagttgcgaggtccgcgtcttcaagattgccgaggacggtaccaagaccgagtgcccgcgcgccgccgacattatgcatgctaccgaggaggagcagggcgaagtttgcttccgcggccgtaacatcatgatgggctaccttgccaaccccaagcttggcgacgaccacgttgccgagatcgaggagaagaacgctgccgctatcgactccgagggctggctccacagtggtgataagggcgccatttctacccgcggcatgctcaagatcacgggccgctacaaggagctcatcatcggcgccggtggcgagaacgtggcgcccgtccctattgaggacgccatcaaggcgcgcatgccttttgtttccaacgccatgatggtcggagataagcgcaagttcatggctgtcctccttaccctcaagacggttggcgccacgggcgagcttcccggtacgaacaagctcatgggcgctgccgccgactacggtgagaccatcgaggacgcctgcgacaacgaggcgctcattgaggagatcacgcagcagctcaaggagatcggtgatgatggcgatgtcacgccctcgaacgcggctcgcatccaaaagttcaccattctcccgctcgacttttccgtctccacggacgagctcacggccacgctcaagctcaagcgctccgtggtcgcagacaagtacgaagacatcatcgaggccttttacgagtccaagagcgtttttgtgccgtactcgaccgttggcgcctacgccacgggcggcccggtcgacgactccgttgtcgatggctcattcaagggcgactttagcatgattggcgacgatgatccggatcttcaaaacgtcgatgtcctcgaggcgattgacgaggacaattaa

SEQ ID NO: 31 - DNA, 38794 bp, Artificial sequence
  plasmid pDAB7361
gtacaaaaaagcaggcttctagacctagctaggtggagtcatcacgcagactatctcagcatgtgcgtagcacgcggccgcagcttatagtaaagatttttttgttaataaaatgaaagttaatatttatggatttatttgaacatatttacaagtttttgttaataaatttatttacagaagtgttaaatttgaaaatgtgttaaatgagagttaatatttatggatataatattactttatttaaaaataaaatgaatttatattaaaatatgatttggtaaaagatattataaagaggaacttggatgagaaagacgacgatgggcaaaagttgcatggcacaccgcttttgttcagtaacatctgcactgtggcgcctttttcacactcaccatgcatgctgccacgtcagctttcacactatgacaccactggccatacacgttgccacctcagctttctcctcttctcactatgacacgactggccatgcatgcatgcatgctgccacctcagctcccgcctcttcacccgtgtctttctctcatgtcgcagtgctgcgtgccaacctcttctctctataaatagagagaagagaatgatggttaaactcaaaccaaaacaagaaaacatacacaaatagcaaaacggatccacaaccaaaaatggcggcccgtctgcaggagcaaaagggaggcgagatggatacccgcattgccatcatcggcatgtcggccatcctcccctgcggcacgaccgtgcgcgagtcgtgggagaccatccgcgccggcatcgactgcctgtcggatctccccgaggaccgcgtcgacgtgacggcgtactttgaccccgtcaagaccaccaaggacaagatctactgcaagcgcggtggcttcattcccgagtacgactttgacgcccgcgagttcggactcaacatgttccagatggaggactcggacgcaaaccagaccatctcgcttctcaaggtcaaggaggccctccaggacgccggcatcgacgccctcggcaaggaaaagaagaacatcggctgcgtgctcggcattggcggcggccaaaagtccagccacgagttctactcgcgccttaattatgttgtcgtggagaaggtcctccgcaagatgggcatgcccgaggaggacgtcaaggtcgccgtcgaaaagtacaaggccaacttccccgagtggcgcctcgactccttccctggcttcctcggcaacgtcaccgccggtcgctgcaccaacaccttcaacctcgacggcatgaactgcgttgtcgacgccgcatgcgcctcgtccctcatcgccgtcaaggtcgccatcgacgagctgctctacggtgactgcgacatgatggtcaccggtgccacctgcacggataactccatcggcatgtacatggccttctccaagacccccgtgttctccacggaccccagcgtgcgcgcctacgacgaaaagacaaagggcatgctcatcggcgagggctccgccatgctcgtcctcaagcgctacgccgacgccgtccgcgacggcgatgagatccacgctgttattcgcggctgcgcctcctccagtgatggcaaggccgccggcatctacacgcccaccatttcgggccaggaggaggccctccgccgcgcctacaaccgcgcctgtgtcgacccggccaccgtcactctcgtcgagggtcacggcaccggtactcccgttggcgaccgcatcgagctcaccgccttgcgcaacctctttgacaaggcctacggcgagggcaacaccgaaaaggtcgctgtgggcagcatcaagtccagcatcggccatctcaaggccgtcgccggtctcgccggtatgatcaaggtcatcatggcgctcaagcacaagactctcccgggcaccatcaacgtcgacaacccacccaacctctacgacaacacgcccatcaacgagtcctcgctctacattaacaccatgaaccgcccctggttcccgccccctggtgtgccccgccgcgccggcatttcgagctttggctttggtggcgccaactaccacgccgtcctcgaggaggccgagcccgagcacacgaccgcgtaccgcctcaacaagcgcccgcagcccgtgctcatgatggccgccacgcccgcggccctccagtcgctctgcgaggcccagctcaaggagttcgaggccgccatcaaggagaacgagaccgtcaagaacaccgcctacatcaagtgcgtcaagttcggcgagcagttcaaattccctggctccatcccggccacaaacgcgcgcctcggcttcctcgtcaaggatgctgaggatgcctgctccaccctccgtgccatctgcgcccaattcgccaaggatgtcaccaaggaggcctggcgcctcccccgcgagggcgtcagcttccgcgccaagggcatcgccaccaacggcgctgtcgccgcgctcttctccggccagggcgcgcagtacacgcacatgtttagcgaggtggccatgaactggccccagttccgccagagcattgccgccatggacgccgcccagtccaaggtcgctggaagcgacaaggactttgagcgcgtctcccaggtcctctacccgcgcaagccgtacgagcgtgagcccgagcaggaccacaagaagatctccctcaccgcctactcgcagccctcgaccctggcctgcgctctcggtgcctttgagatcttcaaggaggccggcttcaccccggactttgccgccggccattcgctcggtgagttcgccgccctctacgccgcgggctgcgtcgaccgcgacgagctctttgagcttgtctgccgccgcgcccgcatcatgggcggcaaggacgcaccggccacccccaagggctgcatggccgccgtcattggccccaacgccgagaacatcaaggtccaggccgccaacgtctggctcggcaactccaactcgccttcgcagaccgtcatcaccggctccgtcgaaggtatccaggccgagagcgcccgcctccagaaggagggcttccgcgtcgtgcctcttgcctgcgagagcgccttccactcgccccagatggagaacgcctcgtcggccttcaaggacgtcatctccaaggtctccttccgcacccccaaggccgagaccaagctcttcagcaacgtctctggcgagacctaccccacggacgcccgcgagatgcttacgcagcacatgaccagcagcgtcaagttcctcacccaggtccgcaacatgcaccaggccggtgcgcgcatctttgtcgagttcggacccaagcaggtgctctccaagcttgtctccgagaccctcaaggatgacccctcggttgtcaccgtctctgtcaacccggcctcgggcacggattcggacatccagctccgcgacgcggccgtccagctcgttgtcgctggcgtcaaccttcagggctttgacaagtgggacgcccccgatgccacccgcatgcaggccatcaagaagaagcgcactaccctccgcctttcggccgccacctacgtctcggacaagaccaagaaggtccgcgacgccgccatgaacgatggccgctgcgtcacctacctcaagggcgccgcaccgctcatcaaggccccggagcccgttgtcgacgaggccgccaagcgcgaggccgagcgtctccagaaggagcttcaggatgcccagcgccagctcgacgacgccaagcgcgccgccgccgaggccaactccaagctcgccgctgccaaggaggaggccaagaccgccgctgcttcggccaagcccgcagttgacactgctgttgtcgaaaagcatcgtgccatcctcaagtccatgctcgcggagctcgatggctacggatcggtcgacgcttcttccctccagcagcagcagcagcagcagacggcccccgccccggtcaaggctgctgcgcctgccgcccccgttgcctcggcccctgccccggctgtctcgaacgagcttcttgagaaggccgagactgtcgtcatggaggtcctcgccgccaagaccggctacgagaccgacatgatcgaggctgacatggagctcgagaccgagctcggcattgactccatcaagcgtgtcgagatcctctccgaggtccaggccatgctcaatgtcgaggccaaggatgtcgatgccctcagccgcactcgcactgttggtgaggttgtcaacgccatgaaggccgagatcgctggcagctctgccccggcgcctgctgccgctgctccggctccggccaaggctgcccctgccgccgctgcgcctgctgtctcgaacgagcttctcgagaaggccgagaccgtcgtcatggaggtcctcgccgccaagactggctacgagactgacatgatcgagtccgacatggagctcgagactgagctcggcattgactccatcaagcgtgtcgagatcctctccgaggttcaggccatgctcaacgtcgaggccaaggacgtcgacgctctcagccgcactcgcactgtgggtgaggtcgtcaacgccatgaaggctgagatcgctggtggctctgccccggcgcctgccgccgctgccccaggtccggctgctgccgcccctgcgcctgccgccgccgcccctgctgtctcgaacgagcttcttgagaaggccgagaccgtcgtcatggaggtcctcgccgccaagactggctacgagactgacatgatcgagtccgacatggagctcgagaccgagctcggcattgactccatcaagcgtgtcgagattctctccgaggtccaggccatgctcaacgtcgaggccaaggacgtcgacgctctcagccgcacccgcactgttggcgaggtcgtcgatgccatgaaggccgagatcgctggtggctctgccccggcgcctgccgccgctgctcctgctccggctgctgccgcccctgcgcctgccgcccctgcgcctgctgtctcgagcgagcttctcgagaaggccgagactgtcgtcatggaggtcctcgccgccaagactggctacgagactgacatgatcgagtccgacatggagctcgagaccgagctcggcattgactccatcaagcgtgtcgagattctctccgaggtccaggccatgctcaacgtcgaggccaaggacgtcgacgctctcagccgcacccgcactgttggcgaggtcgtcgatgccatgaaggccgagatcgctggtggctctgccccggcgcctgccgccgctgctcctgctccggctgctgccgcccctgcgcctgccgcccctgcgcctgccgcccctgcgcctgctgtctcgagcgagcttctcgagaaggccgagactgtcgtcatggaggtcctcgccgccaagactggctacgagactgacatgattgagtccgacatggagctcgagaccgagctcggcattgactccatcaagcgtgtcgagattctctccgaggttcaggccatgctcaacgtcgaggccaaggacgtcgacgctctcagccgcactcgcactgttggtgaggtcgtcgatgccatgaaggctgagatcgctggcagctccgcctcggcgcctgccgccgctgctcctgctccggctgctgccgctcctgcgcccgctgccgccgcccctgctgtctcgaacgagcttctcgagaaagccgagactgtcgtcatggaggtcctcgccgccaagactggctacgagactgacatgatcgagtccgacatggagctcgagactgagctcggcattgactccatcaagcgtgtcgagatcctctccgaggttcaggccatgctcaacgtcgaggccaaggacgtcgatgccctcagccgcacccgcactgttggcgaggttgtcgatgccatgaaggccgagatcgctggtggctctgccccggcgcctgccgccgctgcccctgctccggctgccgccgcccctgctgtctcgaacgagcttctcgagaaggccgagactgtcgtcatggaggtcctcgccgccaagactggctacgagaccgacatgatcgagtccgacatggagctcgagaccgagctcggcattgactccatcaagcgtgtcgagattctctccgaggttcaggccatgctcaacgtcgaggccaaggacgtcgatgctctcagccgcactcgcactgttggcgaggtcgtcgatgccatgaaggctgagatcgccggcagctccgccccggcgcctgccgccgctgctcctgctccggctgctgccgctcctgcgcccgctgccgctgcccctgctgtctcgagcgagcttctcgagaaggccgagaccgtcgtcatggaggtcctcgccgccaagactggctacgagactgacatgattgagtccgacatggagctcgagactgagctcggcattgactccatcaagcgtgtcgagatcctctccgaggttcaggccatgctcaacgtcgaggccaaggacgtcgatgccctcagccgcacccgcactgttggcgaggttgtcgatgccatgaaggccgagatcgctggtggctctgccccggcgcctgccgccgctgcccctgctccggctgccgccgcccctgctgtctcgaacgagcttcttgagaaggccgagaccgtcgtcatggaggtcctcgccgccaagactggctacgagaccgacatgatcgagtccgacatggagctcgagaccgagctcggcattgactccatcaagcgtgtcgagattctctccgaggttcaggccatgctcaacgtcgaggccaaggacgtcgacgctctcagccgcactcgcactgttggcgaggtcgtcgatgccatgaaggctgagatcgctggtggctctgccccggcgcctgccgccgctgctcctgcctcggctggcgccgcgcctgcggtcaagattgactcggtccacggcgctgactgtgatgatctttccctgatgcacgccaaggtggttgacatccgccgcccggacgagctcatcctggagcgccccgagaaccgccccgttctcgttgtcgatgacggcagcgagctcaccctcgccctggtccgcgtcctcggcgcctgcgccgttgtcctgacctttgagggtctccagctcgctcagcgcgctggtgccgctgccatccgccacgtgctcgccaaggatctttccgcggagagcgccgagaaggccatcaaggaggccgagcagcgctttggcgctctcggcggcttcatctcgcagcaggcggagcgcttcgagcccgccgaaatcctcggcttcacgctcatgtgcgccaagttcgccaaggcttccctctgcacggctgtggctggcggccgcccggcctttatcggtgtggcgcgccttgacggccgcctcggattcacttcgcagggcacttctgacgcgctcaagcgtgcccagcgtggtgccatctttggcctctgcaagaccatcggcctcgagtggtccgagtctgacgtcttttcccgcggcgtggacattgctcagggcatgcaccccgaggatgccgccgtggcgattgtgcgcgagatggcgtgcgctgacattcgcattcgcgaggtcggcattggcgcaaaccagcagcgctgcacgatccgtgccgccaagctcgagaccggcaacccgcagcgccagatcgccaaggacgacgtgctgctcgtttctggcggcgctcgcggcatcacgcctctttgcatccgggagatcacgcgccagatcgcgggcggcaagtacattctgcttggccgcagcaaggtctctgcgagcgaaccggcatggtgcgctggcatcactgacgagaaggctgtgcaaaaggctgctacccaggagctcaagcgcgcctttagcgctggcgagggccccaagcccacgccccgcgctgtcactaagcttgtgggctctgttcttggcgctcgcgaggtgcgcagctctattgctgcgattgaagcgctcggcggcaaggccatctactcgtcgtgcgacgtgaactctgccgccgacgtggccaaggccgtgcgcgatgccgagtcccagctcggtgcccgcgtctcgggcatcgttcatgcctcgggcgtgctccgcgaccgtctcatcgagaagaagctccccgacgagttcgacgccgtctttggcaccaaggtcaccggtctcgagaacctcctcgccgccgtcgaccgcgccaacctcaagcacatggtcctcttcagctcgctcgccggcttccacggcaacgtcggccagtctgactacgccatggccaacgaggcccttaacaagatgggcctcgagctcgccaaggacgtctcggtcaagtcgatctgcttcggtccctgggacggtggcatggtgacgccgcagctcaagaagcagttccaggagatgggcgtgcagatcatcccccgcgagggcggcgctgataccgtggcgcgcatcgtgctcggctcctcgccggctgagatccttgtcggcaactggcgcaccccgtccaagaaggtcggctcggacaccatcaccctgcaccgcaagatttccgccaagtccaaccccttcctcgaggaccacgtcatccagggccgccgcgtgctgcccatgacgctggccattggctcgctcgcggagacctgcctcggcctcttccccggctactcgctctgggccattgacgacgcccagctcttcaagggtgtcactgtcgacggcgacgtcaactgcgaggtgaccctcaccccgtcgacggcgccctcgggccgcgtcaacgtccaggccacgctcaagaccttttccagcggcaagctggtcccggcctaccgcgccgtcatcgtgctctccaaccagggcgcgcccccggccaacgccaccatgcagccgccctcgctcgatgccgatccggcgctccagggctccgtctacgacggcaagaccctcttccacggcccggccttccgcggcatcgatgacgtgctctcgtgcaccaagagccagcttgtggccaagtgcagcgctgtccccggctccgacgccgctcgcggcgagtttgccacggacactgacgcccatgaccccttcgtgaacgacctggcctttcaggccatgctcgtctgggtgcgccgcacgctcggccaggctgcgctccccaactcgatccagcgcatcgtccagcaccgcccggtcccgcaggacaagcccttctacattaccctccgctccaaccagtcgggcggtcactcccagcacaagcacgcccttcagttccacaacgagcagggcgatctcttcattgatgtccaggcttcggtcatcgccacggacagccttgccttctaaatctaaactaggccatggtgacttaaggtagttagcttaatcacttaggtcacccagtccaagcccggcctagcacgatgatcatgagtgttgctattgatgtatgttaatactatacacagtcatcgtgtgtgttttataaaactgtaagcttaggatgtttgaggctaatgtaattagcactacaccgtaataaatgagaggtttactttatgttttaataatgttcttacccttgctgctctctaaactgtaatggcgtacggttagctaaactaaagtaaaaatcgattcgcttgagtaaaattagtgaccgggaaagatcatcgactactactgctcagagatgtaatcggtaattaagacttcaagctcaataattaattaggagtaaatctggcttcgaatttttaaattgtcaacttccaaagaaggattggcaagactcaatctcaattgcccaacaaacatatggctctttacaaatttggaatctctttttgatggcaagaacgtcgtaattcctctgtcgatctcatgtaattaccaaactcatctacttattactttctttatatgcacttactgatgcggccgcttaattaagatgagtgatactcaggactcaggactcactctgctgatcactagtgctagcctcgaggtcgacacaactttgtatacaaaagttgtctagacctaggctcagcaactcatccagtcaagttcgagtcagtgagttgggcggccgcagcttatagtaaagatttttttgttaataaaatgaaagttaatatttatggatttatttgaacatatttacaagtttttgttaataaatttatttacagaagtgttaaatttgaaaatgtgttaaatgagagttaatatttatggatataatattactttatttaaaaataaaatgaatttatattaaaatatgatttggtaaaagatattataaagaggaacttggatgagaaagacgacgatgggcaaaagttgcatggcacaccgcttttgttcagtaacatctgcactgtggcgcctttttcacactcaccatgcatgctgccacgtcagctttcacactatgacaccactggccatacacgttgccacctcagctttctcctcttctcactatgacacgactggccatgcatgcatgcatgctgccacctcagctcccgcctcttcacccgtgtctttctctcatgtcgcagtgctgcgtgccaacctcttctctctataaatagagagaagagaatgatggttaaactcaaaccaaaacaagaaaacatacacaaatagcaaaacggatccacaaccaaaaatggctgcaaggaacgtgagtgcggctcatgagatgcatgacgagaagaggatagctgttgtgggcatggctgttcagtatgctggatgcaaaacgaaagacgagttctgggaagttctcatgaatggaaaagttgagagcaaagtgatcagcgacaaacgtcttggttcaaattaccgtgctgaacactacaaagctgaaaggagcaagtatgctgacaccttctgcaatgagacatatggaactcttgatgagaacgaaatagacaatgagcatgaactccttttgaaccttgccaaacaagccttggctgaaacatctgtcaaagattcaacaagatgtggcatagtttctggatgcctcagcttcccgatggacaacctccaaggtgaactcttgaatgtgtaccagaaccatgttgagaagaaacttggtgccagagttttcaaagatgcctctcactggtcagaaagagaacagtccaacaaaccagaggctggtgacagaagaatcttcatggaccctgcttcctttgttgctgaggaactcaatcttggcgctctccactactctgttgatgctgcctgtgccactgcgctctatgtgctcagactggcgcaagatcacttggtctctggtgcagctgatgtgatgctttgtggtgcaacatgcctgccggagccgtttttcatactctctgggttctcaaccttccaagccatgcctgttggaacgggtcagaatgtgtccatgccgctgcacaaagattctcaaggattgacccctggtgaaggaggttccatcatggtcctcaaacgtttggatgacgcaatcagagatggagatcacatctatggaacacttttgggagccaatgtcagcaacagtggcactggtctgccacttaaaccccttttgccgtcagagaaaaagtgcctcatggacacctacacacgtatcaatgtgcatccccacaagattcagtatgttgaatgccatgcaactgggactccacaaggtgatcgtgtggaaattgatgctgtgaaggcttgctttgaaggcaaagtcccacgttttggaaccacaaaagggaactttggacacacattggtggcagctgggtttgctggcatgtgcaaagtgcttctctccatgaagcacgggatcattccacccactccgggaatagatgacgaaacgaagatggaccctctggttgtctctggtgaggccattccctggccagaaacgaatggagaaccgaagcgtgctggtctctcagcgtttggatttggtgggaccaatgctcatgctgtctttgaggaacatgacccaagcaatgctgcatgcactggccatgactccatttctgctctctctgcacgttgtggtggtgagtcaaacatgagaatagcaatcactgggatggatgccacttttggtgctttgaaaggattggatgcttttgaaagggccatctacactggtgctcatggtgctataccactcccagaaaagagatggagattcctggggaaagacaaggacttccttgatctttgtggagtcaaagcaacaccgcatggctgttacattgaagatgttgaagttgatttccagaggctgaggactccaatgactcctgaagatatgctcttgcctcaacagcttctggctgtcaccacaattgatagggccatattggactctggcatgaagaaaggtggaaatgtggctgtctttgtggggttggggaccgatcttgaactctaccgtcaccgtgcaagggttgctctcaaggagagagtgaggcctgaagccagcaagaaactcaatgacatgatgcagtacatcaatgattgtgggacaagcacttcttacaccagctacataggcaacttggttgcaacaagggtcagttcacaatggggcttcacgggaccttccttcacaatcacagaaggcaacaattctgtgtacagatgtgctgaacttggcaaatacctcttggaaacgggagaggttgatggggttgtggttgcgggtgttgatctctgtgggagtgctgagaacctttacgtcaagtcaaggcgtttcaaggtgtctacatctgacaccccgagagccagctttgatgcagctgctgatggttactttgttggagagggctgtggtgcatttgtgctcaagcgtgagacaagctgcaccaaggatgacagaatctatgcttgcatggatgccatagttcctggaaatgttccatctgcatgtttgagagaggcattggatcaagccagagtcaagcctggagacatcgagatgttggagctttctgctgattcagcgaggcatttgaaggacccgtctgttctcccaaaggaactcactgctgaggaagagattggcggacttcagacgattcttcgtgacgatgacaagctcccaaggaatgttgcaactggaagtgtcaaggccactgttggtgacactggttatgcttctggtgctgccagtttgattaaggctgcgctttgcatctacaaccgttacctgcccagcaatggagatgactgggatgaacctgcacctgaagcaccctgggacagcacactctttgcgtgccagacctcaagagcttggttgaagaaccctggtgagagacgttatgcggctgtttccggagtcagtgaaaccagaagttgctacagtgtgctgctttctgaagcagagggacactacgagagagagaacagaatcagtttggatgaggaagcacccaagctcattgtgttgagagcagactcccatgaagagattcttggaagattggacaagataagggaaaggttcttgcagcccacgggtgctgcacccagagagtctgaattgaaggcgcaagcccgtaggatctttcttgaactccttggtgagacccttgcccaagatgcagcttcatctggaagtcagaagccccttgctctcagcttggtctccactccatccaagctccagagagaggtggaacttgcggcaaaaggcattccgagatgtctcaagatgagacgtgattggagttcccctgctggaagcagatatgcgcctgagcctttggccagtgacagagttgccttcatgtatggagaaggaaggagcccttactatggcatcacacaagacattcataggatttggcctgaacttcatgaggtcatcaatgagaaaacaaaccgtctctgggctgaaggtgacagatgggtcatgccaagggccagcttcaagagtgagcttgagtcacaacagcaagagtttgacagaaacatgattgaaatgttccgtcttggaatcctcacctcaattgccttcacaaacctggcgagagatgttctcaacatcacgcccaaagcagcctttggactcagtttgggagagatttccatgatctttgctttctccaagaaaaacggtttgataagcgatcagttgacaaaggatttgagagagtcagatgtctggaacaaagctctggctgttgagttcaatgcgctcagagaagcctggggcattccacagtctgtcccaaaagatgagttctggcaaggttacatagtgaggggaacgaaacaagacatagaagcagccatagcaccagactcaaagtatgtgaggttgaccatcatcaatgatgccaacactgctctcatcagtggaaagcctgatgcatgcaaagctgcgattgctcgtcttggtggcaacatccctgcgcttccagtcactcaaggcatgtgtgggcattgcccagaggtgggaccttacaccaaggacatcgcaaagatccacgccaaccttgagttccctgtggttgatggtcttgatctctggactaccataaaccagaagaggcttgtgccaagagccacgggtgccaaagatgaatgggctccttcatcctttggggagtatgctggacagctctatgagaaacaagccaacttccctcagatagttgaaaccatctacaagcagaactatgatgtgtttgttgaagttgggccaaacaatcacagaagcacagcagtgagaaccacgcttggaccacagagaaaccaccttgctggtgccatagacaagcagaacgaggatgcttggacgacaatagtcaagctcgtggcttcattgaaggctcaccttgttcctggagtgaccatcagtccgctctaccactccaagctcgttgcagaggctgaggcttgttatgctgcgctctgtaaaggtgagaaacccaagaaaaacaagtttgtgagaaagattcagttgaatggcagattcaacagcaaggcagaccccatctcctcagcagaccttgcatccttcccacctgcggaccctgcgattgaagctgccatctcttcaaggatcatgaagcctgtggctccgaaattctatgcgcgtctcaacattgatgagcaagatgagaccagagatccgatcttgaacaaggacaatgcgccttccagctccagctcttccagcagttcctcttccagcagttcatctccgtctcctgctccttcagctccagttcagaagaaagctgccccagctgcggagacaaaagctgttgccagtgctgatgcacttcgtagtgccctgcttgatcttgactccatgcttgcgctcagctctgcaagtgcttctggcaaccttgttgagactgcgccatctgatgccagtgtcattgtccctccgtgcaacattgctgatcttggcagcagagctttcatgaaaacttatggtgtttctgcgcctctgtacaccggtgcaatggccaagggaattgcctctgcggacttggtgatcgcagctggaaggcaaggaatccttgcgtcatttggtgctggaggccttccaatgcaagttgtgcgtgagtccattgaaaagattcaagctgccctgcccaatggaccatatgctgtcaacctcatccattctccttttgacagcaaccttgagaagggaaatgttgatctcttcttggaaaagggtgtcacttttgttgaggcttcagccttcatgacgttgacaccgcaagttgtcagatacagagcggctgggttgacgaggaatgcagatgggtcagtcaacataaggaacagaatcattgggaaagtctccagaactgagctggctgaaatgttcatgcgtcctgcacctgagcatcttttgcagaagctcattgcttctggggagatcaatcaagaacaagctgagttggccagacgtgttcctgtggctgatgacattgcggttgaagctgattctggtggacacactgacaaccgtccaatccatgtcattctgcctctgattatcaacctgagggataggcttcacagagagtgtggatacccagcaaacctgagggttcgtgttggtgctgggggtggcattgggtgtccccaagctgcgctggcaactttcaacatgggtgcctctttcattgtcactggaacagtgaaccaagttgccaaacaatctgggacgtgtgacaatgtgaggaaacagcttgcgaaagcaacttactcagatgtttgcatggcaccggcagctgacatgtttgaggaaggtgtgaaacttcaagttttgaagaaaggaacaatgttcccttcaagagccaacaaactctatgagttgttctgcaagtatgattcttttgagtccatgcctccagcagagcttgcgagggttgagaaaagaatcttcagtcgtgcattggaagaggtctgggatgagaccaagaacttctacatcaaccgtctccacaacccagagaagatacagagggctgagagggaccccaaactgaagatgtcactgtgtttcagatggtatctgtccctggcttcaaggtgggccaacactggagcttctgacagagtcatggactaccaagtttggtgtggtcctgccattggttcattcaatgatttcatcaaaggaacttaccttgatccggcagtggcaaatgagtacccgtgtgttgtgcagatcaacaaacagattcttagaggagcgtgcttcttgaggcgtcttgaaatactgagaaatgcaaggctttcagatggtgcagctgcacttgtggcgagcattgatgacacatatgtccctgctgagaagctgtgagtagttagcttaatcacttaggtcacccagtccaagcccggcctagcacgatgatcatgagtgttgctattgatgtatgttaatactatacacagtcatcgtgtgtgttttataaaactgtaagcttaggatgtttgaggctaatgtaattagcactacaccgtaataaatgagaggtttactttatgttttaataatgttcttacccttgctgctctctaaactgtaatggcgtacggttagctaaactaaagtaaaaatcgattcgcttgagtaaaattagtgaccgggaaagatcatcgactactactgctcagagatgtaatcggtaattaagacttcaagctcaataattaattaggagtaaatctggcttcgaatttttaaattgtcaacttccaaagaaggattggcaagactcaatctcaattgcccaacaaacatatggctctttacaaatttggaatctctttttgatggcaagaacgtcgtaattcctctgtcgatctcatgtaattaccaaactcatctacttattactttctttatatgcacttactgatgcggccgcttaattaatctgacctgaccactagacctgagtgagtacagatgtgctactagtgctagcctcgaggtcgaccaacttttctatacaaagttgtctagacctaggactaggcactgagtgactcactgacctgactgagtgactggcggccgcagcttatagtaaagatttttttgttaataaaatgaaagttaatatttatggatttatttgaacatatttacaagtttttgttaataaatttatttacagaagtgttaaatttgaaaatgtgttaaatgagagttaatatttatggatataatattactttatttaaaaataaaatgaatttatattaaaatatgatttggtaaaagatattataaagaggaacttggatgagaaagacgacgatgggcaaaagttgcatggcacaccgcttttgttcagtaacatctgcactgtggcgcctttttcacactcaccatgcatgctgccacgtcagctttcacactatgacaccactggccatacacgttgccacctcagctttctcctcttctcactatgacacgactggccatgcatgcatgcatgctgccacctcagctcccgcctcttcacccgtgtctttctctcatgtcgcagtgctgcgtgccaacctcttctctctataaatagagagaagagaatgatggttaaactcaaaccaaaacaagaaaacatacacaaatagcaaaacggatccacaaccaaaaatggcgcttcgtgtcaagaccaacaagaagccatgttgggagatgaccaaggaggaactgacctctggcaaaactgaggtgttcaactatgaggaactcctggagtttgcagagggtgacatagctaaggtttttggtccggagtttgctgtcatagacaagtaccccagaagggtgaggctgcctgctcgtgaatacctgcttgtgacaagggtcacactcatggatgccgaggtcaacaactacagagttggtgccagaatggtcactgagtatgatcttccagtgaatggcgaattgtctgagggaggtgattgtccctgggcagttctggttgagagtggacagtgcgatttgatgctgatatcatacatgggaattgatttccagaaccaaggtgacagagtttaccgtctgctcaacaccacgttgacattctatggggttgcccatgagggagagacccttgagtatgacatcagagtgaccggttttgccaaacgtttggatggtggcatctccatgttcttctttgagtatgactgctatgtcaatgggaggcttctcattgagatgagagatggctgtgctggcttcttcacaaatgaggagcttgatgcgggaaagggtgtggtgttcacaagaggggatttggctgccagagctaagattccaaagcaagatgtttctccctatgctgtcgctccctgccttcacaaaacaaaactcaacgaaaaggagatgcagaccttggttgacaaagattgggcttccgtttttggctcaaagaatggcatgccggagatcaactacaaactctgcgcacgtaagatgctcatgattgatagagtcaccagcattgaccataagggaggtgtgtacggtttgggtcagttggttggtgagaaaatcttggagagggaccattggtacttcccatgccattttgttaaggatcaagtcatggctggatctcttgtcagcgacggttgttcacaaatgctcaagatgtacatgatctggctcggtttgcaccttaccaccggaccatttgacttcagacccgtcaacggacacccgaacaaagttaggtgtaggggtcagatatctcctcataagggaaagttggtctacgtcatggagatcaaagagatgggattcgacgaggataacgatccgtacgccattgctgacgtcaacatcattgacgttgatttcgaaaagggtcaagatttcagccttgatagaatcagcgactacggaaagggggatcttaacaaaaagatcgtcgtggacttcaagggcattgctctcaagatgcagaagagatccacgaacaagaacccctccaaagttcagcccgtttttgctaacggtgcagccactgtgggaccggaagcgtccaaggccagctctggtgccagtgctagtgcttctgctgcccctgcgaagcctgctttctcagcagatgttcttgcgccaaagccagttgcacttcctgaacatatcctcaagggtgacgctctcgctccgaaagaaatgtcctggcatcccatgtcaaaacttcctggcaacccgacgccgttcttctcccctagttcttaccctccgagggcaatttgcttcatccctttccctggcaacccacttgacaacaattgcaaagctggagaaatgcctctgaactggtacaacatgtcagagttcatgtgtggaaaagttagcaactgcttgggaccagagttcgcaagatttgataagtcaaatacgagcagaagccctgcttttgatttggctcttgtgactagagttgttgaagtcacaaacatggaacatggcaagttcctgaatgttgattgcaatcccagcaaaggcacaatggtgggggagtttgactgtcctcaagatgcgtggttctttgatggttcttgcaatgatgggcacatgccttattccatcatcatggaaatcggacttcagacatccggtgttctcaccagtgtgttgaaagcaccactgacgatggacaaagatgacattctctttaggaaccttgatgcaagtgctgaaatggtgaggccagatgtggatgtgagggggaaaaccataaggaatgtgaccaagtgcactggatatgcaatgttgggaaagatggggattcacagattcacgtttgagttgtctgttgatggcgtggttttctacaaaggaagcacttcctttggatggttcactccagaggtgtttgctcagcaagctggacttgacaatgggaaaaagacggagccttggtgcaaaactaacaacacgagtgtgagaagagttgaaatcgcatcagccaaaggcaaagaacagctgactgagaaacttccagatgcaactaatgctcaagttctcagaaggtcagaacagtgtgagtatttggattacctcaacattgctcctgattctgggctgcatgggaaaggatatgcgcatggacacaaagatgttaacccacaagactggttcttctcttgtcacttttggtttgatcctgtgatgcctggatctttgggaattgagtcaatgttccagctcattgaggcatttgcggtggaccagaacataccgggagaatacaatgtgagcaatccgacctttgcccatgcccctggaaaaacggcgtggaagtaccgtggtcaattgacaccaaagaaccgtgcgatggactgtgaggtgcacatagtttcaatcacagcctctcctgaaaatggaggctacgttgacatagtggcagatggagcactttgggttgatggtctccgtgtgtatgaagccaaagaactcagagttcgtgttgtcagtgcaaaacctcaagccattccggatgttcaacaacagccacccagcgcaaaagcggaccctgggaaaactggagttgcactcagtccgactcagttgagagatgtcctgcttgaagtggacaatccattgtatcttggtgttgaaaactccaatttggtgcagtttgaatccaaacctgcaacttcttcaaggattgtcagtatcaaaccatgctccataagtgatcttggtgacaagtccttcatggaaacgtacaatgtgtcagcacctctgtacactggagcaatggccaagggaattgcgtctgcggaccttgtcattgctgctgggaagaggaagatattgggttcttttggagcgggtgggcttccaatgcaccatgtgagggcagctttggagaagatacaagcggctctgcctcaaggaccatatgctgtgaacctcattcattcaccttttgacagcaacttggaaaaggggaatgttgatctcttcctcgaaaagggcgttactgtggtggaggcttctgcattcatgaccctcactccccaagttgttcgttaccgtgcagccggactctcaaggaacgctgatgggagtgtcaacatcagaaaccgtatcattggaaaagtgtccagaacagaactcgccgaaatgttcatcagaccggctccggaacacctccttgagaaactcatagcttctggtgagataacacaagaacaagccgaacttgcccgtcgtgttcctgtcgcagacgacatcgctgttgaagctgattctggtggtcacactgacaaccgtcccatccacgtcatcttgcctttgatcatcaaccttaggaacagactgcacagagagtgtggttatcctgcgcaccttagagtcagagttggagctggaggcggtgttggctgcccacaagctgctgcggctgccctcacaatgggagctgccttcatagtgactgggactgtcaatcaagttgctaaacagtccgggacatgtgacaacgtgagaaaacaactcagtcaagccacctacagtgacatttgcatggctccagcagctgatatgtttgaggaaggtgtgaaactccaagttctcaagaagggaacaatgttcccatcaagagctaacaaattgtacgaactcttttgcaagtacgactctttcgattcaatgcctcctgctgaacttgaaaggatcgagaagaggatcttcaagagggcacttcaagaggtctgggaagagaccaaggacttttacatcaatggtttgaagaatccagagaagatacagagagcggaacatgaccccaaactcaagatgtctttgtgtttcagatggtatcttggtcttgcatcacgttgggccaacatgggtgctcctgatcgtgtcatggactatcaagtctggtgtggtccagccattggagccttcaatgacttcatcaaaggaacatatcttgatcctgctgtctctaatgagtacccatgtgttgtccagatcaaccttcagattttgcgtggtgcatgttacctgaggcgtcttaatgctctgagaaatgatccgaggattgatcttgagactgaagatgctgcctttgtctatgagccaacgaatgcgctttgagtagttagcttaatcacttaggtcacccagtccaagcccggcctagcacgatgatcatgagtgttgctattgatgtatgttaatactatacacagtcatcgtgtgtgttttataaaactgtaagcttaggatgtttgaggctaatgtaattagcactacaccgtaataaatgagaggtttactttatgttttaataatgttcttacccttgctgctctctaaactgtaatggcgtacggttagctaaactaaagtaaaaatcgattcgcttgagtaaaattagtgaccgggaaagatcatcgactactactgctcagagatgtaatcggtaattaagacttcaagctcaataattaattaggagtaaatctggcttcgaatttttaaattgtcaacttccaaagaaggattggcaagactcaatctcaattgcccaacaaacatatggctctttacaaatttggaatctctttttgatggcaagaacgtcgtaattcctctgtcgatctcatgtaattaccaaactcatctacttattactttctttatatgcacttactgatgcggccgcttaattaatcacgagtggatgactgtcacgactgactcatgactgactactagtgctagcctcgaggtcgacacaactttgtataataaagttgtctagacctaggcgagtcatgagtcgtgacatgacgtcatgctcatcagactgcggccgcagcttatagtaaagatttttttgttaataaaatgaaagttaatatttatggatttatttgaacatatttacaagtttttgttaataaatttatttacagaagtgttaaatttgaaaatgtgttaaatgagagttaatatttatggatataatattactttatttaaaaataaaatgaatttatattaaaatatgatttggtaaaagatattataaagaggaacttggatgagaaagacgacgatgggcaaaagttgcatggcacaccgcttttgttcagtaacatctgcactgtggcgcctttttcacactcaccatgcatgctgccacgtcagctttcacactatgacaccactggccatacacgttgccacctcagctttctcctcttctcactatgacacgactggccatgcatgcatgcatgctgccacctcagctcccgcctcttcacccgtgtctttctctcatgtcgcagtgctgcgtgccaacctcttctctctataaatagagagaagagaatgatggttaaactcaaaccaaaacaagaaaacatacacaaatagcaaaacggatccacaaccaaaaatgcccactccagatgccactgcgcctctcaacaagccgtcagactatgctgtgtaccacgaagaggatggtcctttctggactgctgattcctctggtgtcagcagagtgaacttctctgaaactggtgtgggatctgaaggtgtcattcctgcgctcacactgattgatgtgtttgagcgtgcggtcaaacgtggtggcaataggattgcattcagaacagagaacatgccaaccttgaggcgtggagaagaggctcctgatgctttgccgctcaaagattggaagtcctggtcttggaaacagtacaaagctgatgttcacagaattgcgagggctctgatggatttgggagttgagcagcacgatgcggtctccatctttggcttcaactcaccagaatggttcctcagtgctgtcggtgcagttcatgctggtgccaagatcgctggaatctacccttcagacactcctgctcaagtgcagtacaaagccttccactctgacactgctgttgcagttgtggagaacgaacagtgcttcaagaaattcgcagaggtggttgaggatctcccttacctcaaagccattgtttgttgggattatgaagccacagacatcacaagggaagatggttcagtggttgaagtcctgacctttgctgagttcctgaagagaggtgacactgtggaagcagctgcacttgatgagagaatcagcaagattgagcccaccatgtgtgctgccctgatctacaccagtggcacaactgggagacccaaagctgtcatgatctcccatgacaaccttgtctttgaagcatctgctgtggtcccgaacttgggaggggcatgcacgaccactgctgaggaaaggattctttcctaccttcctttgtctcatgttgctggaatgatggttgacatcattgctccaatcatagcgacagcgttccacaaaggaaggatctgtgtttgttttgccagaccgtatgatttgagaactggaacccttgggcaaagactcaatgcagtggagccaaccatattccttggtgtgccacgtgtgtgggaaaagatccaagagaaattgatggctgttggtgccaaaaccactggtctcaagaagaaactcagcacggcagccaagaaacgtgggcttgaatttcaagaggaacaacagatagggagaagtggtgccaaccctggctttggaccgcttggaatctacaagaaacttttgggcctcatcaaaggaaagttggggctgaccaaatgcaagtttgcctttgctggcgcagctccaatgacccgtgaaacccttcagtactttggagcgctgaacatcaacatcaatgaggtctatggaatgtctgaatgcagtggggctgccacctggtcaactgacaaagctcatgagtggggcactgttggctatgagatgccctcctgtgaagtcagagtgttcaagattgcggaggatggcaccaagacagagtgcccaagagctgctgacatcatgcatgccacagaagaggaacaaggtgaagtttgcttccgtggaaggaacatcatgatgggatacttggccaacccgaaacttggtgatgaccatgttgctgagattgaagagaagaatgcagctgccatagatagcgaagggtggcttcactctggtgacaagggagcaatttccacaaggggaatgctcaagataacgggcagatacaaggagcttatcataggtgctggtggggagaatgtggctcctgttcccattgaagatgccatcaaggcgaggatgccttttgtttcaaatgcaatgatggttggagacaagaggaagttcatggctgtccttctgactttgaaaacggttggagcaactggagagcttcctggcacaaacaagctcatgggagcagctgcggactatggtgagaccattgaggatgcctgtgacaatgaggcgctcattgaagagataacgcagcaactcaaagagataggtgacgatggagatgtcacgccaagcaatgcagcccgtatacaaaagttcacgattttgccactcgacttcagtgtctccacagatgaactgacagcaacgttgaaattgaagagaagtgtggttgcagacaagtatgaggacatcatagaggctttctatgagagcaagtctgtctttgtgccttactcaacagttggagcttatgcaacgggtggaccagttgatgactctgttgtggatggatcattcaaaggtgactttagcatgattggggatgacgatccggatcttcagaatgtggatgtccttgaagcaattgatgaggacaactgagtagttagcttaatcacttaggtcacccagtccaagcccggcctagcacgatgatcatgagtgttgctattgatgtatgttaatactatacacagtcatcgtgtgtgttttataaaactgtaagcttaggatgtttgaggctaatgtaattagcactacaccgtaataaatgagaggtttactttatgttttaataatgttcttacccttgctgctctctaaactgtaatggcgtacggttagctaaactaaagtaaaaatcgattcgcttgagtaaaattagtgaccgggaaagatcatcgactactactgctcagagatgtaatcggtaattaagacttcaagctcaataattaattaggagtaaatctggcttcgaatttttaaattgtcaacttccaaagaaggattggcaagactcaatctcaattgcccaacaaacatatggctctttacaaatttggaatctctttttgatggcaagaacgtcgtaattcctctgtcgatctcatgtaattaccaaactcatctacttattactttctttatatgcacttactgatgcggccgcttaattaatctgatcatggatgctacgtcacggcagtacaggactatcactagacctaggagctgtgctgggtaactcacatgagtcactggtcacatcagcggccgcagcttatagtaaagatttttttgttaataaaatgaaagttaatatttatggatttatttgaacatatttacaagtttttgttaataaatttatttacagaagtgttaaatttgaaaatgtgttaaatgagagttaatatttatggatataatattactttatttaaaaataaaatgaatttatattaaaatatgatttggtaaaagatattataaagaggaacttggatgagaaagacgacgatgggcaaaagttgcatggcacaccgcttttgttcagtaacatctgcactgtggcgcctttttcacactcaccatgcatgctgccacgtcagctttcacactatgacaccactggccatacacgttgccacctcagctttctcctcttctcactatgacacgactggccatgcatgcatgcatgctgccacctcagctcccgcctcttcacccgtgtctttctctcatgtcgcagtgctgcgtgccaacctcttctctctataaatagagagaagagaatgatggttaaactcaaaccaaaacaagaaaacatacacaaatagcaaaacggatccacaaccaaaaatgcttcagcacacttggcttccgaagcctcccaatctgaccctcttgtcagatgaggttcatctctggaggattcctcttgaccagcctgagtcacaacttcaagaccttgctgccaccctgagcagtgatgaattggcgagggcaaacagattctactttccagaacacagaaggcgtttcactgctgggagaggcatcctcagatccatcttgggtggatacttgggagtggaaccgggtcaagtcaagtttgattatgagtcccgtgggaaaccgatccttggtgacagatttgctgagagtggactcctgttcaacttgtctcacagccagaaccttgccttgtgtgctgtcaactacacgcgtcaaataggcattgatcttgaatatctgcgtccaacatctgacttggagtctcttgcaaagaggttctttctcccaagagaatatgaactcttgaggtcactccctgatgagcagaaacagaagattttctttcgttactggacttgcaaagaggcttatctcaaagcaacgggagatggaatagccaaacttgaagagatcgagatagcactcaccccaacagaacctgccaagctccaaacagctcctgcgtggtctctgttggagcttgtgccagatgacaattgtgttgcagctgtggctgttgcgggttttggttggcagcccaagttctggcattactgagtagttagcttaatcacttaggtcacccagtccaagcccggcctagcacgatgatcatgagtgttgctattgatgtatgttaatactatacacagtcatcgtgtgtgttttataaaactgtaagcttaggatgtttgaggctaatgtaattagcactacaccgtaataaatgagaggtttactttatgttttaataatgttcttacccttgctgctctctaaactgtaatggcgtacggttagctaaactaaagtaaaaatcgattcgcttgagtaaaattagtgaccgggaaagatcatcgactactactgctcagagatgtaatcggtaattaagacttcaagctcaataattaattaggagtaaatctggcttcgaatttttaaattgtcaacttccaaagaaggattggcaagactcaatctcaattgcccaacaaacatatggctctttacaaatttggaatctctttttgatggcaagaacgtcgtaattcctctgtcgatctcatgtaattaccaaactcatctacttattactttctttatatgcacttactgatgcggccgcttaattaactactgtcactgaggccgtagacgagtacggactgatctaactagtgctagcctcgaggtcgacacccagctttcttgtacaaagtggttgcggccgcttaattaaatttaaattcaattaatgcaatcttgattttcaacaacgaaggtaatggcgtaaaagaaaaaatgtatgttattgtattgatctttcatgatgttgaagcgtgccataatatgatgatgtataattaaaatattaactgtcgcattttattgaaatggcactgttatttcaaccatatctttgattctgttacatgacacgactgcaagaagtaaataatagacgccgttgttaaagaattgctatcatatgtgcctaactagagggaatttgagcgtcagacctaatcaaatattacaaaatatctcactctgtcgccagcaatggtgtaatcagcgcagacaaatggcgtaaagatcgcggaaaaacctccccgagtggcatgatagctgcctctgtattgctgatttagtcagccttatttgacttaagggtgccctcgttagtgacaaattgctttcaaggagacagccatgccccacactttgttgaaaaacaaattgcctttggggagacggtaaagccagttgctcttcaataaggaatgtcgaggaggcaatgtaaccgcctctggtagtacacttctctaatccaaaaatcaatttgtattcaagataccgcaaaaaacttatggtttaaaccctgcaggactagtccagaaggtaattatccaagatgtagcatcaagaatccaatgtttacgggaaaaactatggaagtattatgtaagctcagcaagaagcagatcaatatgcggcacatatgcaacctatgttcaaaaatgaagaatgtacagatacaagatcctatactgccagaatacgaagaagaatacgtagaaattgaaaaagaagaaccaggcgaagaaaagaatcttgaagacgtaagcactgacgacaacaatgaaaagaagaagataaggtcggtgattgtgaaagagacatagaggacacatgtaaggtggaaaatgtaagggcggaaagtaaccttatcacaaaggaatcttatcccccactacttatccttttatatttttccgtgtcatttttgcccttgagttttcctatataaggaaccaagttcggcatttgtgaaaacaagaaaaaatttggtgtaagctattttctttgaagtactgaggatacaacttcagagaaatttgtaagtttgtaggtaccagatctggatcccaaaccatgtctccggagaggagaccagttgagattaggccagctacagcagctgatatggccgcggtttgtgatatcgttaaccattacattgagacgtctacagtgaactttaggacagagccacaaacaccacaagagtggattgatgatctagagaggttgcaagatagatacccttggttggttgctgaggttgagggtgttgtggctggtattgcttacgctgggccctggaaggctaggaacgcttacgattggacagttgagagtactgtttacgtgtcacataggcatcaaaggttgggcctaggatctacattgtacacacatttgcttaagtctatggaggcgcaaggttttaagtctgtggttgctgttataggccttccaaacgatccatctgttaggttgcatgaggctttgggatacacagcccggggtacattgcgcgcagctggatacaagcatggtggatggcatgatgttggtttttggcaaagggattttgagttgccagctcctccaaggccagttaggccagttacccaaatctgagtagttagcttaatcacctagagctcgatcggcggcaatagcttcttagcgccatcccgggttgatcctatctgtgttgaaatagttgcggtgggcaaggctctctttcagaaagacaggcggccaaaggaacccaaggtgaggtgggctatggctctcagttccttgtggaagcgcttggtctaaggtgcagaggtgttagcgggatgaagcaaaagtgtccgattgtaacaagatatgttgatcctacgtaaggatattaaagtatgtattcatcactaatataatcagtgtattccaatatgtactacgatttccaatgtctttattgtcgccgtatgtaatcggcgtcacaaaataatccccggtgactttcttttaatccaggatgaaataatatgttattataatttttgcgatttggtccgttataggaattgaagtgtgcttgaggtcggtcgccaccactcccatttcataattttacatgtatttgaaaaataaaaatttatggtattcaatttaaacacgtatacttgtaaagaatgatatcttgaaagaaatatagtttaaatatttattgataaaataacaagtcaggtattatagtccaagcaaaaacataaatttattgatgcaagtttaaattcagaaatatttcaataactgattatatcagctggtacattgccgtagatgaaagactgagtgcgatattatggtgtaatacataggaattcgtttaaacgatctgcgtctaattttcggtccaacttgcacaggaaagacgtcgaccgcggtagctcttgcccagcagactgggcttccagtcctttcgctcgatcgggtccaatgttgtcctcagctgtgaaccggaagcggacgaccaacagtggaagaactgaaaggaacgagccgtctataccttgatgatcggcctctggtgaagggtatcatcgcagccaagcaagctcatgaaaggctgatgggggaggtgtataattatgaggcccacggcgggcttattctttagggaggatctatctcgttgctcaagtgcatggcgcaaagcagttattggagtgcggattttcgttggcatattattcgccacgagttagcagacgaagagaccttcatgaacgtggccaaggccagagttaagcagatgttacgccctgctgcaggcctttctattatccaatagttggttgatctttggaaagagcctcggctgaggcccatactgaaagagatcgatggatatcgatatgccatgttgtttgctagccagaaccagatcacatccgatatgctattgcagcttgacgcagatatggaggataagttgattcatgggatcgctcaggagtagctcatccatgcacgccgacaagaacagaaattccgtcgagttaacgcagccgcttacgacggattcgaaggtcatccattcggaatgtattagtttgcaccagctccgcgtcacacctgtcttcatttgaataagatgttagcaattgtttttagctttgtcttgttgtggcagggcggcaagtgcttcagacatcattctgttttcaaattttatgctggagaacagcttcttaattcctttggaaataatagactgcgtcttaaaattcagatgtctggatatagatatgattgtaaaataacctatttaagtgtcatttagaacataagttttatgaatgttcttccattttcgtcatcgaacgaataagagtaaatacaccttttttaacattacaaataagttcttatacgttgtttatacaccgggaatcatttccattattttcgcgcaaaagtcacggatattcgtgaaagcgacataaactgcgaaatttgcggggagtgtcttgagtttgcctcgaggctagcgcatgcacatagacacacacatcatctcattgatgcttggtaataattgtcattagattgtttttatgcatagatgcactcgaaatcagccaattttagacaagtatcaaacggatgtgacttcagtacattaaaaacgtccgcaatgtgttattaagttgtctaagcgtcaatttgatttacaattgaatatatcctgccccagccagccaacagctcgatttacaattgaatatatcctgccggccggcccacgcgtgtcgaggaattctgatctggcccccatttggacgtgaatgtagacacgtcgaaataaagatttccgaattagaataatttgtttattgctttcgcctataaatacgacggatcgtaatttgtcgttttatcaaaatgtactttcattttataataacgctgcggacatctacatttttgaattgaaaaaaaattggtaattactctttctttttctccatattgaccatcatactcattgctgatccatgtagatttcccggacatgaagccatttacaattgaatatatcctgccgccgctgccgctttgcacccggtggagcttgcatgttggtttctacgcagaactgagccggttaggcagataatttccattgagaactgagccatgtgcaccttccccccaacacggtgagcgacggggcaacggagtgatccacatgggacttttaaacatcatccgtcggatggcgttgcgagagaagcagtcgatccgtgagatcagccgacgcaccgggcaggcgcgcaacacgatcgcaaagtatttgaacgcaggtacaatcgagccgacgttcacgcggaacgaccaagcaagcttggctgccatttttggggtgaggccgttcgcggccgaggggcgcagcccctggggggatgggaggcccgcgttagcgggccgggagggttcgagaagggggggcaccccccttcggcgtgcgcggtcacgcgcacagggcgcagccctggttaaaaacaaggtttataaatattggtttaaaagcaggttaaaagacaggttagcggtggccgaaaaacgggcggaaacccttgcaaatgctggattttctgcctgtggacagcccctcaaatgtcaataggtgcgcccctcatctgtcagcactctgcccctcaagtgtcaaggatcgcgcccctcatctgtcagtagtcgcgcccctcaagtgtcaataccgcagggcacttatccccaggcttgtccacatcatctgtgggaaactcgcgtaaaatcaggcgttttcgccgatttgcgaggctggccagctccacgtcgccggccgaaatcgagcctgcccctcatctgtcaacgccgcgccgggtgagtcggcccctcaagtgtcaacgtccgcccctcatctgtcagtgagggccaagttttccgcgaggtatccacaacgccggcggccgcggtgtctcgcacacggcttcgacggcgtttctggcgcgtttgcagggccatagacggccgccagcccagcggcgagggcaaccagcccggtgagcgtcggaaagggtcgacggatcttttccgctgcataaccctgcttcggggtcattatagcgattttttcggtatatccatcctttttcgcacgatatacaggattttgccaaagggttcgtgtagactttccttggtgtatccaacggcgtcagccgggcaggataggtgaagtaggcccacccgcgagcgggtgttccttcttcactgtcccttattcgcacctggcggtgctcaacgggaatcctgctctgcgaggctggccggctaccgccggcgtaacagatgagggcaagcggatggctgatgaaaccaagccaaccaggaagggcagcccacctatcaaggtgtactgccttccagacgaacgaagagcgattgaggaaaaggcggcggcggccggcatgagcctgtcggcctacctgctggccgtcggccagggctacaaaatcacgggcgtcgtggactatgagcacgtccgcgagctggcccgcatcaatggcgacctgggccgcctgggcggcctgctgaaactctggctcaccgacgacccgcgcacggcgcggttcggtgatgccacgatcctcgccctgctggcgaagatcgaagagaagcaggacgagcttggcaaggtcatgatgggcgtggtccgcccgagggcagagccatgacttttttagccgctaaaacggccggggggtgcgcgtgattgccaagcacgtccccatgcgctccatcaagaagagcgacttcgcggagctggtattcgtgcagggcaagattcggaataccaagtacgagaaggacggccagacggtctacgggaccgacttcattgccgataaggtggattatctggacaccaaggcaccaggcgggtcaaatcaggaataagggcacattgccccggcgtgagtcggggcaatcccgcaaggagggtgaatgaatcggacgtttgaccggaaggcatacaggcaagaactgatcgacgcggggttttccgccgaggatgccgaaaccatcgcaagccgcaccgtcatgcgtgcgccccgcgaaaccttccagtccgtcggctcgatggtccagcaagctacggccaagatcgagcgcgacagcgtgcaactggctccccctgccctgcccgcgccatcggccgccgtggagcgttcgcgtcgtctcgaacaggaggcggcaggtttggcgaagtcgatgaccatcgacacgcgaggaactatgacgaccaagaagcgaaaaaccgccggcgaggacctggcaaaacaggtcagcgaggccaagcaggccgcgttgctgaaacacacgaagcagcagatcaaggaaatgcagctttccttgttcgatattgcgccgtggccggacacgatgcgagcgatgccaaacgacacggcccgctctgccctgttcaccacgcgcaacaagaaaatcccgcgcgaggcgctgcaaaacaaggtcattttccacgtcaacaaggacgtgaagatcacctacaccggcgtcgagctgcgggccgacgatgacgaactggtgtggcagcaggtgttggagtacgcgaagcgcacccctatcggcgagccgatcaccttcacgttctacgagctttgccaggacctgggctggtcgatcaatggccggtattacacgaaggccgaggaatgcctgtcgcgcctacaggcgacggcgatgggcttcacgtccgaccgcgttgggcacctggaatcggtgtcgctgctgcaccgcttccgcgtcctggaccgtggcaagaaaacgtcccgttgccaggtcctgatcgacgaggaaatcgtcgtgctgtttgctggcgaccactacacgaaattcatatgggagaagtaccgcaagctgtcgccgacggcccgacggatgttcgactatttcagctcgcaccgggagccgtacccgctcaagctggaaaccttccgcctcatgtgcggatcggattccacccgcgtgaagaagtggcgcgagcaggtcggcgaagcctgcgaagagttgcgaggcagcggcctggtggaacacgcctgggtcaatgatgacctggtgcattgcaaacgctagggccttgtggggtcagttccggctgggggttcagcagccagcgctttactggcatttcaggaacaagcgggcactgctcgacgcacttgcttcgctcagtatcgctcgggacgcacggcgcgctctacgaactgccgataaacagaggattaaaattgacaattgtgattaaggctcagattcgacggcttggagcggccgacgtgcaggatttccgcgagatccgattgtcggccctgaagaaagctccagagatgttcgggtccgtttacgagcacgaggagaaaaagcccatggaggcgttcgctgaacggttgcgagatgccgtggcattcggcgcctacatcgacggcgagatcattgggctgtcggtcttcaaacaggaggacggccccaaggacgctcacaaggcgcatctgtccggcgttttcgtggagcccgaacagcgaggccgaggggtcgccggtatgctgctgcgggcgttgccggcgggtttattgctcgtgatgatcgtccgacagattccaacgggaatctggtggatgcgcatcttcatcctcggcgcacttaatatttcgctattctggagcttgttgtttatttcggtctaccgcctgccgggcggggtcgcggcgacggtaggcgctgtgcagccgctgatggtcgtgttcatctctgccgctctgctaggtagcccgatacgattgatggcggtcctgggggctatttgcggaactgcgggcgtggcgctgttggtgttgacaccaaacgcagcgctagatcctgtcggcgtcgcagcgggcctggcgggggcggtttccatggcgttcggaaccgtgctgacccgcaagtggcaacctcccgtgcctctgctcacctttaccgcctggcaactggcggccggaggacttctgctcgttccagtagctttagtgtttgatccgccaatcccgatgcctacaggaaccaatgttctcggcctggcgtggctcggcctgatcggagcgggtttaacctacttcctttggttccgggggatctcgcgactcgaacctacagttgtttccttactgggctttctcagcccccgagcgcttagtgggaatttgtaccccttatcgaaccgggagcacaggatgacgcctaacaattcattcaagccgacaccgcttcgcggcgcggcttaattcaggagttaaacatcatgagggaagcggtgatcgccgaagtatcgactcaactatcagaggtagttggcgtcatcgagcgccatctcgaaccgacgttgctggccgtacatttgtacggctccgcagtggatggcggcctgaagccacacagtgatattgatttgctggttacggtgaccgtaaggcttgatgaaacaacgcggcgagctttgatcaacgaccttttggaaacttcggcttcccctggagagagcgagattctccgcgctgtagaagtcaccattgttgtgcacgacgacatcattccgtggcgttatccagctaagcgcgaactgcaatttggagaatggcagcgcaatgacattcttgcaggtatcttcgagccagccacgatcgacattgatctggctatcttgctgacaaaagcaagagaacatagcgttgccttggtaggtccagcggcggaggaactctttgatccggttcctgaacaggatctatttgaggcgctaaatgaaaccttaacgctatggaactcgccgcccgactgggctggcgatgagcgaaatgtagtgcttacgttgtcccgcatttggtacagcgcagtaaccggcaaaatcgcgccgaaggatgtcgctgccgactgggcaatggagcgcctgccggcccagtatcagcccgtcatacttgaagctaggcaggcttatcttggacaagaagatcgcttggcctcgcgcgcagatcagttggaagaatttgttcactacgtgaaaggcgagatcaccaaggtagtcggcaaataatgtctaacaattcgttcaagccgacgccgcttcgcggcgcggcttaactcaagcgttagagagctggggaagactatgcgcgatctgttgaaggtggttctaagcctcgtcttgcgatggcatttcgatccattcccattccgcgctcaagatggcttcccctcggcagttcatcagggctaaatcaatctagccgacttgtccggtgaaatgggctgcactccaacagaaacaatcaaacaaacatacacagcgacttattcacacgagctcaaattacaacggtatatatcctgccagtcagcatcatcacaccaaaagttaggcccgaatagtttgaaattagaaagctcgcaattgaggtctacaggccaaattcgctcttagccgtacaatattactcaccggatcctaaccggtttaattaaggcgcgccatgcccgggcaagcggccgcacaagttt

SEQ ID NO: 32 - DNA, 39711 bp, Artificial sequence
  plasmid pDAB7363
gtacaaaaaagcaggcttctagacctaggtggagtcatcacgcagactatctcagcatgtgcgtagcacgcggccgcagcttatagtaaagatttttttgttaataaaatgaaagttaatatttatggatttatttgaacatatttacaagtttttgttaataaatttatttacagaagtgttaaatttgaaaatgtgttaaatgagagttaatatttatggatataatattactttatttaaaaataaaatgaatttatattaaaatatgatttggtaaaagatattataaagaggaacttggatgagaaagacgacgatgggcaaaagttgcatggcacaccgcttttgttcagtaacatctgcactgtggcgcctttttcacactcaccatgcatgctgccacgtcagctttcacactatgacaccactggccatacacgttgccacctcagctttctcctcttctcactatgacacgactggccatgcatgcatgcatgctgccacctcagctcccgcctcttcacccgtgtctttctctcatgtcgcagtgctgcgtgccaacctcttctctctataaatagagagaagagaatgatggttaaactcaaaccaaaacaagaaaacatacacaaatagcaaaacggatccacaaccaaaaatggcttcctctatgctctcttccgctactatggttgcctctccggctcaggccactatggtcgctcctttcaacggacttaagtcctccgctgccttcccagccacccgcaaggctaacaacgacattacttccatcacaagcaacggcggaagagttaactgcatgcaggtgtggcctccgattggaaagaagaagtttgagactctctcttaccttcctgaccttaccgattccgaagcagcgaggctgcaagagcagaaaggaggtgagatggacacgaggattgcgatcataggcatgagcgccatacttccttgtggaaccacggtgagagagtcatgggagaccataagggctggcattgattgcctgtctgatcttcctgaggatcgtgttgatgtgactgcgtactttgacccagtcaagaccacaaaggacaaaatctactgcaagagaggaggtttcattcctgagtatgactttgatgcgcgtgagtttggtctcaacatgttccagatggaagattctgatgcgaatcagaccatctcacttctcaaggtcaaagaagcacttcaagatgctgggattgatgcacttggaaaggagaagaaaaacataggatgcgtgcttggcattggaggtggacagaagagttcacatgagttctacagcagactcaactatgtggttgtggagaaagtcttgagaaagatggggatgccagaggaagatgtcaaagtggctgtggagaagtacaaagcgaacttcccagaatggagacttgactctttccctggattccttgggaatgtcactgctggcagatgcaccaacacattcaacttggatggcatgaactgcgttgtggatgctgcatgtgcaagctccttgatagcagtcaaggttgcgattgatgaactgctctatggtgactgcgacatgatggtcactggtgcaacctgcacagacaactccattgggatgtacatggctttctcaaagacacctgtgttcagcacggacccaagtgtgagagcgtatgatgagaaaacgaaagggatgctcattggtgagggatcagccatgttggtgctcaaacgttatgcagatgcagtgagggatggtgatgagattcatgctgtgattcgtggttgtgcaagctcaagtgatggcaaagcagctggcatctacactcccacaatcagtggtcaagaggaagccttgagacgtgcatacaatcgtgcctgcgttgaccctgccactgtcactttggttgagggtcatgggactggcactccagttggagataggattgagttgactgcgttgaggaacttgtttgacaaagcgtatggtgaagggaacacagagaaagttgcagttggaagtatcaagtccagtattggtcatttgaaggctgttgctggtcttgctggaatgatcaaggtcatcatggctctcaaacacaagactttgcctggaacgatcaatgtggacaatccacccaatctctatgacaacactcccatcaatgagtcatccctctacatcaacacgatgaacagaccctggttccctccacctggtgttccgagacgtgctggaatatccagctttggctttggaggtgccaactaccatgcagtgttggaagaggctgaaccagagcacacgacagcgtacagactcaacaaacgtccacaaccggtgttgatgatggctgcaactcctgctgcgttgcagagcctttgtgaagctcagctgaaagagtttgaagctgcgatcaaggagaatgagacagtcaagaatactgcctacatcaagtgtgtcaagtttggagaacagttcaagttccctgggagcatacctgcgaccaatgcgagactgggattcttggtcaaagatgcggaggatgcgtgctccacgcttcgtgctatatgtgctcagtttgccaaagatgtgaccaaagaagcgtggaggcttccgagagaaggagtttctttccgtgccaaaggcattgccaccaatggtgctgttgctgcactcttctctggacaaggtgctcagtacacacacatgttcagtgaagttgcgatgaactggcctcagttcagacagtccattgctgcaatggacgctgcacagtccaaggttgctggaagtgacaaagactttgaaagagtctctcaagtcctgtacccaaggaaaccgtacgaacgtgagccagaacaagatcacaagaaaatctcactcacagcatacagccagccgtcaaccctggcatgtgctcttggtgcctttgagattttcaaggaagctggattcactccagactttgcagctggacacagcttgggtgagtttgctgcgctctatgcagctggttgtgttgacagagatgagttgtttgaacttgtttgcagaagggcaaggatcatgggaggcaaagatgcacctgccacacccaaaggttgcatggcagctgtcataggacccaacgcagagaacatcaaggttcaagctgccaacgtctggcttggaaactcaaactctccgtctcagactgtcattactgggtctgttgaagggattcaagctgaaagtgccagattgcagaaggaagggttcagagttgtgcctcttgcttgtgagtctgccttccattctccacagatggaaaatgccagctcagctttcaaagatgtcatatccaaggtttccttccgtacacccaaagcagaaacaaagctcttcagcaatgtttctggagagacctatccgacggatgccagagagatgctcactcaacacatgacctcatctgtgaagttcctgacccaagtgaggaacatgcaccaagctggtgcgagaatctttgttgagtttggaccgaaacaagttctcagcaaacttgtttctgaaaccctcaaagatgacccgtctgttgtcacagtgtctgtgaacccagcttctggcacggactctgacatacagttgagggatgctgcagttcagctggttgtggctggtgtcaatcttcaagggtttgacaagtgggatgctcctgatgccacgaggatgcaagccatcaagaaaaagagaaccacactcagactttcagctgccacctatgtcagtgacaagaccaagaaagtgagggatgctgccatgaacgacggaagatgtgtcacatacctcaagggtgctgcaccactcatcaaggctcctgaacctgtggttgacgaagctgccaagagggaggctgaaaggcttcagaaggagcttcaagacgctcagaggcagcttgacgacgccaaacgtgcagctgcagaagccaactccaaacttgctgctgccaaggaggaagccaagactgctgcagcttcagccaagcctgcagttgacactgctgttgtggagaaacatcgtgccatcctcaagtccatgctggctgagctggatggttatggaagtgttgatgcttcttcccttcagcaacagcaacagcaacagactgctccggcgcctgttaaagccgctgcccctgccgctcccgttgcaagtgctcctgctcccgccgtgtccaacgagttgcttgagaaagctgagacagttgtgatggaggttctcgctgccaagactggatacgaaacagacatgattgaggcggacatggagcttgagactgagttgggaattgacagcatcaagagggttgaaattctttctgaagtccaagctatgcttaacgttgaggcgaaagatgttgatgctctctctaggacgagaacagtgggtgaagttgtcaacgctatgaaggcagaaatcgctggttcttccgctccggcgccggcagctgccgcacctgcaccggctaaagcggctccagctgcagctgcaccagctgtttctaatgagctgctcgaaaaggcagaaactgttgtgatggaagtccttgctgccaaaactggctacgaaactgacatgatagaatcagacatggagcttgagacggagcttggaattgattccatcaagcgtgtggaaatcctcagtgaagtccaagccatgctcaatgtggaagctaaggatgtggatgctctctcaaggaccagaactgtcggtgaggttgtcaatgccatgaaggctgagatagctggaggctccgctcctgcgccggccgctgccgctcctggtcccgctgccgcggctccagctccagctgcagccgctccggccgtctcaaacgaactccttgaaaaagctgagaccgtcgtgatggaggtcttggcagctaaaaccggctatgagactgacatgattgagtctgacatggaattggagacagaacttgggatagacagcatcaaacgtgttgaaatcctcagtgaggtccaagctatgctgaacgtggaagcgaaggatgttgatgctctgtccagaacgaggaccgttggtgaggttgtggatgccatgaaggctgaaattgctggagggtctgcgcccgcgccagctgcagccgctcctgcacccgcagccgcggcacctgctccagctgcacctgcacctgccgtttcttcagaactcttggagaaggctgagacggttgtgatggaggttttggctgcaaagactggctatgagaccgacatgattgaatctgatatggaattggagacagagcttgggatcgattccatcaaaagagtggagatcctgagtgaagtccaagccatgctcaatgttgaagctaaggatgttgatgcactttcaagaacaaggacagtgggtgaggttgtggatgccatgaaggcggagattgctggagggagcgcgcctgcgccagctgccgcggcacctgcaccggcagccgcagctccagctccagctgcaccagcaccggccgcgcccgcgccagctgtttcatccgaactcctggaaaaggccgagacggttgtgatggaggtgctcgcagctaagactggttacgagaccgacatgattgaaagtgacatggagcttgaaaccgagttgggaatagatagcatcaaacgtgttgaaatcttgtctgaggtccaagctatgttgaacgtggaggcaaaagatgtcgatgcgctttcaagaaccagaacagtcggtgaggtcgtggacgccatgaaggctgaaattgccggaagctctgctagtgcgccagctgcagccgcacctgcacctgctgccgcggcacctgctccagctgcagccgctcctgccgtcagcaatgagttgctggagaaagccgaaacagttgtgatggaagtccttgctgcaaaaactggttacgaaacggacatgattgagtcagacatggaattggagaccgaacttggaatagattccatcaagagagtggagatcctctctgaggtgcaagccatgctcaacgttgaggctaaagatgttgatgcactcagtaggacaagaactgtgggggaagttgtcgatgcgatgaaggctgagattgctggaggctctgctcctgcgccggcagctgccgcacctgcacccgcagccgcggcaccagctgtcagcaacgaattgcttgagaaggctgaaacagttgtcatggaagtgctggctgcaaaaaccggctatgagactgacatgattgagtctgacatggaacttgagacggaattgggcattgacagcatcaagcgtgttgagatcctcagtgaagtccaagcaatgctcaatgtggaggctaaggatgtggatgccctctcaaggaccagaacagttggtgaggtcgttgatgcgatgaaggcggagatcgctggaagttccgcgcctgcgccagctgcagccgctcctgcacccgcagccgcggcaccggctccagctgcagccgcaccggccgtctcctcagaactcctggaaaaggctgagacagttgtgatggaagtccttgctgcgaaaactggctatgagaccgacatgattgaatctgacatggaactggagaccgagcttggaattgactccatcaaacgtgttgaaatcctctctgaggttcaagcgatgttgaatgtggaggccaaagatgttgatgctctttccagaacaaggacggtgggagaggtggttgatgccatgaaggctgagatagctgggggttctgctcctgcgccagctgcagccgctcctgctcccgctgccgcggcaccagctgtcagcaacgaactccttgaaaaagctgaaactgttgtgatggaggttttggctgcaaagactggatacgagactgacatgatagagtcagacatggagttggaaacagagcttgggattgatagcatcaagcgtgtggaaatcctttctgaggttcaagccatgctgaacgttgaggccaaagatgtcgatgctttgtcaaggaccagaacggttggagaagtggtcgatgccatgaaggctgagatagctggtggatcagcccctgctccggctgcagccgctcctgcaagtgccggtgctgcaccagctgtgaagattgattcagttcatggtgctgactgtgacgatttgtcactgatgcacgcaaaggtggttgacatcagaaggccagatgaactgattctggaaagaccggagaaccgtccagttcttgtcgttgacgatggctcagagttgacacttgctcttgtgagggtgttgggagcctgtgcagttgtcttgacctttgagggattgcagttggctcagagagctggtgcagctgccattcgtcatgttctggctaaggacctttcagcagaatcagctgagaaggccatcaaagaggctgagcaaagatttggagcgttgggaggcttcataagccagcaagcagaaaggtttgaaccagctgagatactgggtttcacactcatgtgtgcgaagtttgccaaagcctctctctgcactgctgtggctggaggtcgtcctgccttcatcggtgtggctaggcttgacggcagacttggattcacctctcaaggcacttctgacgcactcaagagagcacagcgtggagcgatctttggactctgcaagacaatagggttggagtggtcagaatctgatgtgttcagccgtggtgtggacattgctcaagggatgcacccagaagatgctgcagttgccatagttagggagatggcgtgtgctgacatcagaatcagagaggttgggattggagcaaaccagcaaagatgcacaatcagagctgccaagttggagactgggaaccctcagagacagatagcgaaagacgatgtgcttctggtttctggaggtgctcgtgggatcacacctctttgcatccgtgagatcacgcgtcagattgctggaggcaagtacattctgttgggtcgtagcaaagtttctgcgtctgaaccagcatggtgtgctggcatcactgatgagaaggctgtgcagaaagctgccacccaagagttgaagagggccttcagtgctggtgaaggacccaaacccactccaagggctgtcacgaaacttgtgggatctgttcttggtgctcgtgaagtgagaagctccattgctgccattgaagctctgggtggcaaagcgatctacagctcttgtgatgtgaactctgctgcagatgttgccaaagcagttagggatgcagagtcccagcttggtgccagagttagtggaatcgttcacgcttctggtgtgctccgtgatcgtctcatagagaagaaactccctgacgagtttgatgctgtctttgggaccaaagtcactgggttggagaatcttctggctgcagttgatcgtgccaacctcaaacacatggttctcttcagctcccttgctggtttccacggcaatgttggtcagtctgactatgcgatggcaaacgaagctctcaacaagatgggtttggaacttgcgaaggatgtcagtgtcaagtccatctgctttggtccctgggatggtgggatggtgacacctcaactcaagaaacagtttcaagaaatgggagttcagatcattcctcgtgaaggaggtgctgatacagttgcgaggattgtgttgggatcaagtcctgctgagatccttgttggaaactggaggacaccatccaagaaagttggaagtgacacgatcaccctgcatagaaagatcagtgccaagtccaatcccttcttggaggatcatgtcatacaaggcagaagggtgttgccaatgacccttgctattgggagccttgctgagacctgccttggactcttccctggctactctctctgggccatagatgacgcacagctcttcaaaggtgtcactgttgatggagacgtcaactgtgaagtgaccctcacaccgtccactgctccgagtgggagggtgaatgtccaagcgacgctcaagacgttctcaagtggaaaacttgttccagcctacagagctgtcatagtgttgtccaaccaaggtgctccacctgccaatgcaaccatgcagcctccgagccttgatgcagatcctgctttgcaagggtcagtctatgatggcaagactctctttcatggtcctgcgttcagaggcattgatgacgttctcagctgcaccaagagccagcttgttgccaagtgttctgctgttcctggatcagatgcagccagaggagagtttgcaactgacactgatgcacatgatccctttgtcaatgatcttgcctttcaagcaatgttggtctgggtgaggagaacgctgggacaagctgcactcccgaactccattcagaggatagtccaacacagaccggtcccacaagacaaacccttctacatcaccctcagatccaatcagagtggtggacatagccagcacaaacatgcacttcagttccacaacgaacaaggtgatctcttcattgatgttcaagcctctgtcattgcgacagactcacttgcgttctgagtagttagcttaatcacttaggtcacccagtccaagcccggcctagcacgatgatcatgagtgttgctattgatgtatgttaatactatacacagtcatcgtgtgtgttttataaaactgtaagcttaggatgtttgaggctaatgtaattagcactacaccgtaataaatgagaggtttactttatgttttaataatgttcttacccttgctgctctctaaactgtaatggcgtacggttagctaaactaaagtaaaaatcgattcgcttgagtaaaattagtgaccgggaaagatcatcgactactactgctcagagatgtaatcggtaattaagacttcaagctcaataattaattaggagtaaatctggcttcgaatttttaaattgtcaacttccaaagaaggattggcaagactcaatctcaattgcccaacaaacatatggctctttacaaatttggaatctctttttgatggcaagaacgtcgtaattcctctgtcgatctcatgtaattaccaaactcatctacttattactttctttatatgcacttactgatgcggccgcttaattaagatgagtgatactcaggactcaggactcactctgctgatcactagtgctagcctcgaggtcgacacaactttgtatacaaaagttgtctagacctaggctcagcaactcatccagtcaagttcgagtcagtgagttgggcggccgcagcttatagtaaagatttttttgttaataaaatgaaagttaatatttatggatttatttgaacatatttacaagtttttgttaataaatttatttacagaagtgttaaatttgaaaatgtgttaaatgagagttaatatttatggatataatattactttatttaaaaataaaatgaatttatattaaaatatgatttggtaaaagatattataaagaggaacttggatgagaaagacgacgatgggcaaaagttgcatggcacaccgcttttgttcagtaacatctgcactgtggcgcctttttcacactcaccatgcatgctgccacgtcagctttcacactatgacaccactggccatacacgttgccacctcagctttctcctcttctcactatgacacgactggccatgcatgcatgcatgctgccacctcagctcccgcctcttcacccgtgtctttctctcatgtcgcagtgctgcgtgccaacctcttctctctataaatagagagaagagaatgatggttaaactcaaaccaaaacaagaaaacatacacaaatagcaaaacggatccacaaccaaaaatggcttcctctatgctctcttccgctactatggttgcctctccggctcaggccactatggtcgctcctttcaacggacttaagtcctccgctgccttcccagccacccgcaaggctaacaacgacattacttccatcacaagcaacggcggaagagttaactgcatgcaggtgtggcctccgattggaaagaagaagtttgagactctctcttaccttcctgaccttaccgattccgaagctgcaaggaacgtgagtgcggctcatgagatgcatgacgagaagaggatagctgttgtgggcatggctgttcagtatgctggatgcaaaacgaaagacgagttctgggaagttctcatgaatggaaaagttgagagcaaagtgatcagcgacaaacgtcttggttcaaattaccgtgctgaacactacaaagctgaaaggagcaagtatgctgacaccttctgcaatgagacatatggaactcttgatgagaacgaaatagacaatgagcatgaactccttttgaaccttgccaaacaagccttggctgaaacatctgtcaaagattcaacaagatgtggcatagtttctggatgcctcagcttcccgatggacaacctccaaggtgaactcttgaatgtgtaccagaaccatgttgagaagaaacttggtgccagagttttcaaagatgcctctcactggtcagaaagagaacagtccaacaaaccagaggctggtgacagaagaatcttcatggaccctgcttcctttgttgctgaggaactcaatcttggcgctctccactactctgttgatgctgcctgtgccactgcgctctatgtgctcagactggcgcaagatcacttggtctctggtgcagctgatgtgatgctttgtggtgcaacatgcctgccggagccgtttttcatactctctgggttctcaaccttccaagccatgcctgttggaacgggtcagaatgtgtccatgccgctgcacaaagattctcaaggattgacccctggtgaaggaggttccatcatggtcctcaaacgtttggatgacgcaatcagagatggagatcacatctatggaacacttttgggagccaatgtcagcaacagtggcactggtctgccacttaaaccccttttgccgtcagagaaaaagtgcctcatggacacctacacacgtatcaatgtgcatccccacaagattcagtatgttgaatgccatgcaactgggactccacaaggtgatcgtgtggaaattgatgctgtgaaggcttgctttgaaggcaaagtcccacgttttggaaccacaaaagggaactttggacacacattggtggcagctgggtttgctggcatgtgcaaagtgcttctctccatgaagcacgggatcattccacccactccgggaatagatgacgaaacgaagatggaccctctggttgtctctggtgaggccattccctggccagaaacgaatggagaaccgaagcgtgctggtctctcagcgtttggatttggtgggaccaatgctcatgctgtctttgaggaacatgacccaagcaatgctgcatgcactggccatgactccatttctgctctctctgcacgttgtggtggtgagtcaaacatgagaatagcaatcactgggatggatgccacttttggtgctttgaaaggattggatgcttttgaaagggccatctacactggtgctcatggtgctataccactcccagaaaagagatggagattcctggggaaagacaaggacttccttgatctttgtggagtcaaagcaacaccgcatggctgttacattgaagatgttgaagttgatttccagaggctgaggactccaatgactcctgaagatatgctcttgcctcaacagcttctggctgtcaccacaattgatagggccatattggactctggcatgaagaaaggtggaaatgtggctgtctttgtggggttggggaccgatcttgaactctaccgtcaccgtgcaagggttgctctcaaggagagagtgaggcctgaagccagcaagaaactcaatgacatgatgcagtacatcaatgattgtgggacaagcacttcttacaccagctacataggcaacttggttgcaacaagggtcagttcacaatggggcttcacgggaccttccttcacaatcacagaaggcaacaattctgtgtacagatgtgctgaacttggcaaatacctcttggaaacgggagaggttgatggggttgtggttgcgggtgttgatctctgtgggagtgctgagaacctttacgtcaagtcaaggcgtttcaaggtgtctacatctgacaccccgagagccagctttgatgcagctgctgatggttactttgttggagagggctgtggtgcatttgtgctcaagcgtgagacaagctgcaccaaggatgacagaatctatgcttgcatggatgccatagttcctggaaatgttccatctgcatgtttgagagaggcattggatcaagccagagtcaagcctggagacatcgagatgttggagctttctgctgattcagcgaggcatttgaaggacccgtctgttctcccaaaggaactcactgctgaggaagagattggcggacttcagacgattcttcgtgacgatgacaagctcccaaggaatgttgcaactggaagtgtcaaggccactgttggtgacactggttatgcttctggtgctgccagtttgattaaggctgcgctttgcatctacaaccgttacctgcccagcaatggagatgactgggatgaacctgcacctgaagcaccctgggacagcacactctttgcgtgccagacctcaagagcttggttgaagaaccctggtgagagacgttatgcggctgtttccggagtcagtgaaaccagaagttgctacagtgtgctgctttctgaagcagagggacactacgagagagagaacagaatcagtttggatgaggaagcacccaagctcattgtgttgagagcagactcccatgaagagattcttggaagattggacaagataagggaaaggttcttgcagcccacgggtgctgcacccagagagtctgaattgaaggcgcaagcccgtaggatctttcttgaactccttggtgagacccttgcccaagatgcagcttcatctggaagtcagaagccccttgctctcagcttggtctccactccatccaagctccagagagaggtggaacttgcggcaaaaggcattccgagatgtctcaagatgagacgtgattggagttcccctgctggaagcagatatgcgcctgagcctttggccagtgacagagttgccttcatgtatggagaaggaaggagcccttactatggcatcacacaagacattcataggatttggcctgaacttcatgaggtcatcaatgagaaaacaaaccgtctctgggctgaaggtgacagatgggtcatgccaagggccagcttcaagagtgagcttgagtcacaacagcaagagtttgacagaaacatgattgaaatgttccgtcttggaatcctcacctcaattgccttcacaaacctggcgagagatgttctcaacatcacgcccaaagcagcctttggactcagtttgggagagatttccatgatctttgctttctccaagaaaaacggtttgataagcgatcagttgacaaaggatttgagagagtcagatgtctggaacaaagctctggctgttgagttcaatgcgctcagagaagcctggggcattccacagtctgtcccaaaagatgagttctggcaaggttacatagtgaggggaacgaaacaagacatagaagcagccatagcaccagactcaaagtatgtgaggttgaccatcatcaatgatgccaacactgctctcatcagtggaaagcctgatgcatgcaaagctgcgattgctcgtcttggtggcaacatccctgcgcttccagtcactcaaggcatgtgtgggcattgcccagaggtgggaccttacaccaaggacatcgcaaagatccacgccaaccttgagttccctgtggttgatggtcttgatctctggactaccataaaccagaagaggcttgtgccaagagccacgggtgccaaagatgaatgggctccttcatcctttggggagtatgctggacagctctatgagaaacaagccaacttccctcagatagttgaaaccatctacaagcagaactatgatgtgtttgttgaagttgggccaaacaatcacagaagcacagcagtgagaaccacgcttggaccacagagaaaccaccttgctggtgccatagacaagcagaacgaggatgcttggacgacaatagtcaagctcgtggcttcattgaaggctcaccttgttcctggagtgaccatcagtccgctctaccactccaagctcgttgcagaggctgaggcttgttatgctgcgctctgtaaaggtgagaaacccaagaaaaacaagtttgtgagaaagattcagttgaatggcagattcaacagcaaggcagaccccatctcctcagcagaccttgcatccttcccacctgcggaccctgcgattgaagctgccatctcttcaaggatcatgaagcctgtggctccgaaattctatgcgcgtctcaacattgatgagcaagatgagaccagagatccgatcttgaacaaggacaatgcgccttccagctccagctcttccagcagttcctcttccagcagttcatctccgtctcctgctccttcagctccagttcagaagaaagctgccccagctgcggagacaaaagctgttgccagtgctgatgcacttcgtagtgccctgcttgatcttgactccatgcttgcgctcagctctgcaagtgcttctggcaaccttgttgagactgcgccatctgatgccagtgtcattgtccctccgtgcaacattgctgatcttggcagcagagctttcatgaaaacttatggtgtttctgcgcctctgtacaccggtgcaatggccaagggaattgcctctgcggacttggtgatcgcagctggaaggcaaggaatccttgcgtcatttggtgctggaggccttccaatgcaagttgtgcgtgagtccattgaaaagattcaagctgccctgcccaatggaccatatgctgtcaacctcatccattctccttttgacagcaaccttgagaagggaaatgttgatctcttcttggaaaagggtgtcacttttgttgaggcttcagccttcatgacgttgacaccgcaagttgtcagatacagagcggctgggttgacgaggaatgcagatgggtcagtcaacataaggaacagaatcattgggaaagtctccagaactgagctggctgaaatgttcatgcgtcctgcacctgagcatcttttgcagaagctcattgcttctggggagatcaatcaagaacaagctgagttggccagacgtgttcctgtggctgatgacattgcggttgaagctgattctggtggacacactgacaaccgtccaatccatgtcattctgcctctgattatcaacctgagggataggcttcacagagagtgtggatacccagcaaacctgagggttcgtgttggtgctgggggtggcattgggtgtccccaagctgcgctggcaactttcaacatgggtgcctctttcattgtcactggaacagtgaaccaagttgccaaacaatctgggacgtgtgacaatgtgaggaaacagcttgcgaaagcaacttactcagatgtttgcatggcaccggcagctgacatgtttgaggaaggtgtgaaacttcaagttttgaagaaaggaacaatgttcccttcaagagccaacaaactctatgagttgttctgcaagtatgattcttttgagtccatgcctccagcagagcttgcgagggttgagaaaagaatcttcagtcgtgcattggaagaggtctgggatgagaccaagaacttctacatcaaccgtctccacaacccagagaagatacagagggctgagagggaccccaaactgaagatgtcactgtgtttcagatggtatctgtccctggcttcaaggtgggccaacactggagcttctgacagagtcatggactaccaagtttggtgtggtcctgccattggttcattcaatgatttcatcaaaggaacttaccttgatccggcagtggcaaatgagtacccgtgtgttgtgcagatcaacaaacagattcttagaggagcgtgcttcttgaggcgtcttgaaatactgagaaatgcaaggctttcagatggtgcagctgcacttgtggcgagcattgatgacacatatgtccctgctgagaagctgtgagtagttagcttaatcacttaggtcacccagtccaagcccggcctagcacgatgatcatgagtgttgctattgatgtatgttaatactatacacagtcatcgtgtgtgttttataaaactgtaagcttaggatgtttgaggctaatgtaattagcactacaccgtaataaatgagaggtttactttatgttttaataatgttcttacccttgctgctctctaaactgtaatggcgtacggttagctaaactaaagtaaaaatcgattcgcttgagtaaaattagtgaccgggaaagatcatcgactactactgctcagagatgtaatcggtaattaagacttcaagctcaataattaattaggagtaaatctggcttcgaatttttaaattgtcaacttccaaagaaggattggcaagactcaatctcaattgcccaacaaacatatggctctttacaaatttggaatctctttttgatggcaagaacgtcgtaattcctctgtcgatctcatgtaattaccaaactcatctacttattactttctttatatgcacttactgatgcggccgcttaattaatctgacctgaccactagacctgagtgagtacagatgtgctactagtgctagcctcgaggtcgaccaacttttctatacaaagttgtctagacctaggactaggcactgagtgactcactgacctgactgagtgactggcggccgcagcttatagtaaagatttttttgttaataaaatgaaagttaatatttatggatttatttgaacatatttacaagtttttgttaataaatttatttacagaagtgttaaatttgaaaatgtgttaaatgagagttaatatttatggatataatattactttatttaaaaataaaatgaatttatattaaaatatgatttggtaaaagatattataaagaggaacttggatgagaaagacgacgatgggcaaaagttgcatggcacaccgcttttgttcagtaacatctgcactgtggcgcctttttcacactcaccatgcatgctgccacgtcagctttcacactatgacaccactggccatacacgttgccacctcagctttctcctcttctcactatgacacgactggccatgcatgcatgcatgctgccacctcagctcccgcctcttcacccgtgtctttctctcatgtcgcagtgctgcgtgccaacctcttctctctataaatagagagaagagaatgatggttaaactcaaaccaaaacaagaaaacatacacaaatagcaaaacggatccacaaccaaaaatggcttcctctatgctctcttccgctactatggttgcctctccggctcaggccactatggtcgctcctttcaacggacttaagtcctccgctgccttcccagccacccgcaaggctaacaacgacattacttccatcacaagcaacggcggaagagttaactgcatgcaggtgtggcctccgattggaaagaagaagtttgagactctctcttaccttcctgaccttaccgattccgaagcgcttcgtgtcaagaccaacaagaagccatgttgggagatgaccaaggaggaactgacctctggcaaaactgaggtgttcaactatgaggaactcctggagtttgcagagggtgacatagctaaggtttttggtccggagtttgctgtcatagacaagtaccccagaagggtgaggctgcctgctcgtgaatacctgcttgtgacaagggtcacactcatggatgccgaggtcaacaactacagagttggtgccagaatggtcactgagtatgatcttccagtgaatggcgaattgtctgagggaggtgattgtccctgggcagttctggttgagagtggacagtgcgatttgatgctgatatcatacatgggaattgatttccagaaccaaggtgacagagtttaccgtctgctcaacaccacgttgacattctatggggttgcccatgagggagagacccttgagtatgacatcagagtgaccggttttgccaaacgtttggatggtggcatctccatgttcttctttgagtatgactgctatgtcaatgggaggcttctcattgagatgagagatggctgtgctggcttcttcacaaatgaggagcttgatgcgggaaagggtgtggtgttcacaagaggggatttggctgccagagctaagattccaaagcaagatgtttctccctatgctgtcgctccctgccttcacaaaacaaaactcaacgaaaaggagatgcagaccttggttgacaaagattgggcttccgtttttggctcaaagaatggcatgccggagatcaactacaaactctgcgcacgtaagatgctcatgattgatagagtcaccagcattgaccataagggaggtgtgtacggtttgggtcagttggttggtgagaaaatcttggagagggaccattggtacttcccatgccattttgttaaggatcaagtcatggctggatctcttgtcagcgacggttgttcacaaatgctcaagatgtacatgatctggctcggtttgcaccttaccaccggaccatttgacttcagacccgtcaacggacacccgaacaaagttaggtgtaggggtcagatatctcctcataagggaaagttggtctacgtcatggagatcaaagagatgggattcgacgaggataacgatccgtacgccattgctgacgtcaacatcattgacgttgatttcgaaaagggtcaagatttcagccttgatagaatcagcgactacggaaagggggatcttaacaaaaagatcgtcgtggacttcaagggcattgctctcaagatgcagaagagatccacgaacaagaacccctccaaagttcagcccgtttttgctaacggtgcagccactgtgggaccggaagcgtccaaggccagctctggtgccagtgctagtgcttctgctgcccctgcgaagcctgctttctcagcagatgttcttgcgccaaagccagttgcacttcctgaacatatcctcaagggtgacgctctcgctccgaaagaaatgtcctggcatcccatgtcaaaacttcctggcaacccgacgccgttcttctcccctagttcttaccctccgagggcaatttgcttcatccctttccctggcaacccacttgacaacaattgcaaagctggagaaatgcctctgaactggtacaacatgtcagagttcatgtgtggaaaagttagcaactgcttgggaccagagttcgcaagatttgataagtcaaatacgagcagaagccctgcttttgatttggctcttgtgactagagttgttgaagtcacaaacatggaacatggcaagttcctgaatgttgattgcaatcccagcaaaggcacaatggtgggggagtttgactgtcctcaagatgcgtggttctttgatggttcttgcaatgatgggcacatgccttattccatcatcatggaaatcggacttcagacatccggtgttctcaccagtgtgttgaaagcaccactgacgatggacaaagatgacattctctttaggaaccttgatgcaagtgctgaaatggtgaggccagatgtggatgtgagggggaaaaccataaggaatgtgaccaagtgcactggatatgcaatgttgggaaagatggggattcacagattcacgtttgagttgtctgttgatggcgtggttttctacaaaggaagcacttcctttggatggttcactccagaggtgtttgctcagcaagctggacttgacaatgggaaaaagacggagccttggtgcaaaactaacaacacgagtgtgagaagagttgaaatcgcatcagccaaaggcaaagaacagctgactgagaaacttccagatgcaactaatgctcaagttctcagaaggtcagaacagtgtgagtatttggattacctcaacattgctcctgattctgggctgcatgggaaaggatatgcgcatggacacaaagatgttaacccacaagactggttcttctcttgtcacttttggtttgatcctgtgatgcctggatctttgggaattgagtcaatgttccagctcattgaggcatttgcggtggaccagaacataccgggagaatacaatgtgagcaatccgacctttgcccatgcccctggaaaaacggcgtggaagtaccgtggtcaattgacaccaaagaaccgtgcgatggactgtgaggtgcacatagtttcaatcacagcctctcctgaaaatggaggctacgttgacatagtggcagatggagcactttgggttgatggtctccgtgtgtatgaagccaaagaactcagagttcgtgttgtcagtgcaaaacctcaagccattccggatgttcaacaacagccacccagcgcaaaagcggaccctgggaaaactggagttgcactcagtccgactcagttgagagatgtcctgcttgaagtggacaatccattgtatcttggtgttgaaaactccaatttggtgcagtttgaatccaaacctgcaacttcttcaaggattgtcagtatcaaaccatgctccataagtgatcttggtgacaagtccttcatggaaacgtacaatgtgtcagcacctctgtacactggagcaatggccaagggaattgcgtctgcggaccttgtcattgctgctgggaagaggaagatattgggttcttttggagcgggtgggcttccaatgcaccatgtgagggcagctttggagaagatacaagcggctctgcctcaaggaccatatgctgtgaacctcattcattcaccttttgacagcaacttggaaaaggggaatgttgatctcttcctcgaaaagggcgttactgtggtggaggcttctgcattcatgaccctcactccccaagttgttcgttaccgtgcagccggactctcaaggaacgctgatgggagtgtcaacatcagaaaccgtatcattggaaaagtgtccagaacagaactcgccgaaatgttcatcagaccggctccggaacacctccttgagaaactcatagcttctggtgagataacacaagaacaagccgaacttgcccgtcgtgttcctgtcgcagacgacatcgctgttgaagctgattctggtggtcacactgacaaccgtcccatccacgtcatcttgcctttgatcatcaaccttaggaacagactgcacagagagtgtggttatcctgcgcaccttagagtcagagttggagctggaggcggtgttggctgcccacaagctgctgcggctgccctcacaatgggagctgccttcatagtgactgggactgtcaatcaagttgctaaacagtccgggacatgtgacaacgtgagaaaacaactcagtcaagccacctacagtgacatttgcatggctccagcagctgatatgtttgaggaaggtgtgaaactccaagttctcaagaagggaacaatgttcccatcaagagctaacaaattgtacgaactcttttgcaagtacgactctttcgattcaatgcctcctgctgaacttgaaaggatcgagaagaggatcttcaagagggcacttcaagaggtctgggaagagaccaaggacttttacatcaatggtttgaagaatccagagaagatacagagagcggaacatgaccccaaactcaagatgtctttgtgtttcagatggtatcttggtcttgcatcacgttgggccaacatgggtgctcctgatcgtgtcatggactatcaagtctggtgtggtccagccattggagccttcaatgacttcatcaaaggaacatatcttgatcctgctgtctctaatgagtacccatgtgttgtccagatcaaccttcagattttgcgtggtgcatgttacctgaggcgtcttaatgctctgagaaatgatccgaggattgatcttgagactgaagatgctgcctttgtctatgagccaacgaatgcgctttgagtagttagcttaatcacttaggtcacccagtccaagcccggcctagcacgatgatcatgagtgttgctattgatgtatgttaatactatacacagtcatcgtgtgtgttttataaaactgtaagcttaggatgtttgaggctaatgtaattagcactacaccgtaataaatgagaggtttactttatgttttaataatgttcttacccttgctgctctctaaactgtaatggcgtacggttagctaaactaaagtaaaaatcgattcgcttgagtaaaattagtgaccgggaaagatcatcgactactactgctcagagatgtaatcggtaattaagacttcaagctcaataattaattaggagtaaatctggcttcgaatttttaaattgtcaacttccaaagaaggattggcaagactcaatctcaattgcccaacaaacatatggctctttacaaatttggaatctctttttgatggcaagaacgtcgtaattcctctgtcgatctcatgtaattaccaaactcatctacttattactttctttatatgcacttactgatgcggccgcttaattaatcacgagtggatgactgtcacgactgactcatgactgactactagtgctagcctcgaggtcgacacaactttgtataataaagttgtctagacctaggcgagtcatgagtcgtgacatgacgtcatgctcatcagactgcggccgcagcttatagtaaagatttttttgttaataaaatgaaagttaatatttatggatttatttgaacatatttacaagtttttgttaataaatttatttacagaagtgttaaatttgaaaatgtgttaaatgagagttaatatttatggatataatattactttatttaaaaataaaatgaatttatattaaaatatgatttggtaaaagatattataaagaggaacttggatgagaaagacgacgatgggcaaaagttgcatggcacaccgcttttgttcagtaacatctgcactgtggcgcctttttcacactcaccatgcatgctgccacgtcagctttcacactatgacaccactggccatacacgttgccacctcagctttctcctcttctcactatgacacgactggccatgcatgcatgcatgctgccacctcagctcccgcctcttcacccgtgtctttctctcatgtcgcagtgctgcgtgccaacctcttctctctataaatagagagaagagaatgatggttaaactcaaaccaaaacaagaaaacatacacaaatagcaaaacggatccacaaccaaaaatgcccactccagatgccactgcgcctctcaacaagccgtcagactatgctgtgtaccacgaagaggatggtcctttctggactgctgattcctctggtgtcagcagagtgaacttctctgaaactggtgtgggatctgaaggtgtcattcctgcgctcacactgattgatgtgtttgagcgtgcggtcaaacgtggtggcaataggattgcattcagaacagagaacatgccaaccttgaggcgtggagaagaggctcctgatgctttgccgctcaaagattggaagtcctggtcttggaaacagtacaaagctgatgttcacagaattgcgagggctctgatggatttgggagttgagcagcacgatgcggtctccatctttggcttcaactcaccagaatggttcctcagtgctgtcggtgcagttcatgctggtgccaagatcgctggaatctacccttcagacactcctgctcaagtgcagtacaaagccttccactctgacactgctgttgcagttgtggagaacgaacagtgcttcaagaaattcgcagaggtggttgaggatctcccttacctcaaagccattgtttgttgggattatgaagccacagacatcacaagggaagatggttcagtggttgaagtcctgacctttgctgagttcctgaagagaggtgacactgtggaagcagctgcacttgatgagagaatcagcaagattgagcccaccatgtgtgctgccctgatctacaccagtggcacaactgggagacccaaagctgtcatgatctcccatgacaaccttgtctttgaagcatctgctgtggtcccgaacttgggaggggcatgcacgaccactgctgaggaaaggattctttcctaccttcctttgtctcatgttgctggaatgatggttgacatcattgctccaatcatagcgacagcgttccacaaaggaaggatctgtgtttgttttgccagaccgtatgatttgagaactggaacccttgggcaaagactcaatgcagtggagccaaccatattccttggtgtgccacgtgtgtgggaaaagatccaagagaaattgatggctgttggtgccaaaaccactggtctcaagaagaaactcagcacggcagccaagaaacgtgggcttgaatttcaagaggaacaacagatagggagaagtggtgccaaccctggctttggaccgcttggaatctacaagaaacttttgggcctcatcaaaggaaagttggggctgaccaaatgcaagtttgcctttgctggcgcagctccaatgacccgtgaaacccttcagtactttggagcgctgaacatcaacatcaatgaggtctatggaatgtctgaatgcagtggggctgccacctggtcaactgacaaagctcatgagtggggcactgttggctatgagatgccctcctgtgaagtcagagtgttcaagattgcggaggatggcaccaagacagagtgcccaagagctgctgacatcatgcatgccacagaagaggaacaaggtgaagtttgcttccgtggaaggaacatcatgatgggatacttggccaacccgaaacttggtgatgaccatgttgctgagattgaagagaagaatgcagctgccatagatagcgaagggtggcttcactctggtgacaagggagcaatttccacaaggggaatgctcaagataacgggcagatacaaggagcttatcataggtgctggtggggagaatgtggctcctgttcccattgaagatgccatcaaggcgaggatgccttttgtttcaaatgcaatgatggttggagacaagaggaagttcatggctgtccttctgactttgaaaacggttggagcaactggagagcttcctggcacaaacaagctcatgggagcagctgcggactatggtgagaccattgaggatgcctgtgacaatgaggcgctcattgaagagataacgcagcaactcaaagagataggtgacgatggagatgtcacgccaagcaatgcagcccgtatacaaaagttcacgattttgccactcgacttcagtgtctccacagatgaactgacagcaacgttgaaattgaagagaagtgtggttgcagacaagtatgaggacatcatagaggctttctatgagagcaagtctgtctttgtgccttactcaacagttggagcttatgcaacgggtggaccagttgatgactctgttgtggatggatcattcaaaggtgactttagcatgattggggatgacgatccggatcttcagaatgtggatgtccttgaagcaattgatgaggacaactgagtagttagcttaatcacttaggtcacccagtccaagcccggcctagcacgatgatcatgagtgttgctattgatgtatgttaatactatacacagtcatcgtgtgtgttttataaaactgtaagcttaggatgtttgaggctaatgtaattagcactacaccgtaataaatgagaggtttactttatgttttaataatgttcttacccttgctgctctctaaactgtaatggcgtacggttagctaaactaaagtaaaaatcgattcgcttgagtaaaattagtgaccgggaaagatcatcgactactactgctcagagatgtaatcggtaattaagacttcaagctcaataattaattaggagtaaatctggcttcgaatttttaaattgtcaacttccaaagaaggattggcaagactcaatctcaattgcccaacaaacatatggctctttacaaatttggaatctctttttgatggcaagaacgtcgtaattcctctgtcgatctcatgtaattaccaaactcatctacttattactttctttatatgcacttactgatgcggccgcttaattaatctgatcatggatgctacgtcacggcagtacaggactatcactagacctaggagctgtgctgggtaactcacatgagtcactggtcacatcagcggccgcagcttatagtaaagatttttttgttaataaaatgaaagttaatatttatggatttatttgaacatatttacaagtttttgttaataaatttatttacagaagtgttaaatttgaaaatgtgttaaatgagagttaatatttatggatataatattactttatttaaaaataaaatgaatttatattaaaatatgatttggtaaaagatattataaagaggaacttggatgagaaagacgacgatgggcaaaagttgcatggcacaccgcttttgttcagtaacatctgcactgtggcgcctttttcacactcaccatgcatgctgccacgtcagctttcacactatgacaccactggccatacacgttgccacctcagctttctcctcttctcactatgacacgactggccatgcatgcatgcatgctgccacctcagctcccgcctcttcacccgtgtctttctctcatgtcgcagtgctgcgtgccaacctcttctctctataaatagagagaagagaatgatggttaaactcaaaccaaaacaagaaaacatacacaaatagcaaaacggatccacaaccaaaaatggcttcctctatgctctcttccgctactatggttgcctctccggctcaggccactatggtcgctcctttcaacggacttaagtcctccgctgccttcccagccacccgcaaggctaacaacgacattacttccatcacaagcaacggcggaagagttaactgcatgcaggtgtggcctccgattggaaagaagaagtttgagactctctcttaccttcctgaccttaccgattccgaacttcagcacacttggcttccgaagcctcccaatctgaccctcttgtcagatgaggttcatctctggaggattcctcttgaccagcctgagtcacaacttcaagaccttgctgccaccctgagcagtgatgaattggcgagggcaaacagattctactttccagaacacagaaggcgtttcactgctgggagaggcatcctcagatccatcttgggtggatacttgggagtggaaccgggtcaagtcaagtttgattatgagtcccgtgggaaaccgatccttggtgacagatttgctgagagtggactcctgttcaacttgtctcacagccagaaccttgccttgtgtgctgtcaactacacgcgtcaaataggcattgatcttgaatatctgcgtccaacatctgacttggagtctcttgcaaagaggttctttctcccaagagaatatgaactcttgaggtcactccctgatgagcagaaacagaagattttctttcgttactggacttgcaaagaggcttatctcaaagcaacgggagatggaatagccaaacttgaagagatcgagatagcactcaccccaacagaacctgccaagctccaaacagctcctgcgtggtctctgttggagcttgtgccagatgacaattgtgttgcagctgtggctgttgcgggttttggttggcagcccaagttctggcattactgagtagttagcttaatcacttaggtcacccagtccaagcccggcctagcacgatgatcatgagtgttgctattgatgtatgttaatactatacacagtcatcgtgtgtgttttataaaactgtaagcttaggatgtttgaggctaatgtaattagcactacaccgtaataaatgagaggtttactttatgttttaataatgttcttacccttgctgctctctaaactgtaatggcgtacggttagctaaactaaagtaaaaatcgattcgcttgagtaaaattagtgaccgggaaagatcatcgactactactgctcagagatgtaatcggtaattaagacttcaagctcaataattaattaggagtaaatctggcttcgaatttttaaattgtcaacttccaaagaaggattggcaagactcaatctcaattgcccaacaaacatatggctctttacaaatttggaatctctttttgatggcaagaacgtcgtaattcctctgtcgatctcatgtaattaccaaactcatctacttattactttctttatatgcacttactgatgcggccgcttaattaactactgtcactgaggccgtagacgagtacggactgatctaactagtgctagcctcgaggtcgacacccagctttcttgtacaaagtggttgcggccgcttaattaaatttaaattcaattaatgcaatcttgattttcaacaacgaaggtaatggcgtaaaagaaaaaatgtatgttattgtattgatctttcatgatgttgaagcgtgccataatatgatgatgtataattaaaatattaactgtcgcattttattgaaatggcactgttatttcaaccatatctttgattctgttacatgacacgactgcaagaagtaaataatagacgccgttgttaaagaattgctatcatatgtgcctaactagagggaatttgagcgtcagacctaatcaaatattacaaaatatctcactctgtcgccagcaatggtgtaatcagcgcagacaaatggcgtaaagatcgcggaaaaacctccccgagtggcatgatagctgcctctgtattgctgatttagtcagccttatttgacttaagggtgccctcgttagtgacaaattgctttcaaggagacagccatgccccacactttgttgaaaaacaaattgcctttggggagacggtaaagccagttgctcttcaataaggaatgtcgaggaggcaatgtaaccgcctctggtagtacacttctctaatccaaaaatcaatttgtattcaagataccgcaaaaaacttatggtttaaaccctgcaggactagtccagaaggtaattatccaagatgtagcatcaagaatccaatgtttacgggaaaaactatggaagtattatgtaagctcagcaagaagcagatcaatatgcggcacatatgcaacctatgttcaaaaatgaagaatgtacagatacaagatcctatactgccagaatacgaagaagaatacgtagaaattgaaaaagaagaaccaggcgaagaaaagaatcttgaagacgtaagcactgacgacaacaatgaaaagaagaagataaggtcggtgattgtgaaagagacatagaggacacatgtaaggtggaaaatgtaagggcggaaagtaaccttatcacaaaggaatcttatcccccactacttatccttttatatttttccgtgtcatttttgcccttgagttttcctatataaggaaccaagttcggcatttgtgaaaacaagaaaaaatttggtgtaagctattttctttgaagtactgaggatacaacttcagagaaatttgtaagtttgtaggtaccagatctggatcccaaaccatgtctccggagaggagaccagttgagattaggccagctacagcagctgatatggccgcggtttgtgatatcgttaaccattacattgagacgtctacagtgaactttaggacagagccacaaacaccacaagagtggattgatgatctagagaggttgcaagatagatacccttggttggttgctgaggttgagggtgttgtggctggtattgcttacgctgggccctggaaggctaggaacgcttacgattggacagttgagagtactgtttacgtgtcacataggcatcaaaggttgggcctaggatctacattgtacacacatttgcttaagtctatggaggcgcaaggttttaagtctgtggttgctgttataggccttccaaacgatccatctgttaggttgcatgaggctttgggatacacagcccggggtacattgcgcgcagctggatacaagcatggtggatggcatgatgttggtttttggcaaagggattttgagttgccagctcctccaaggccagttaggccagttacccaaatctgagtagttagcttaatcacctagagctcgatcggcggcaatagcttcttagcgccatcccgggttgatcctatctgtgttgaaatagttgcggtgggcaaggctctctttcagaaagacaggcggccaaaggaacccaaggtgaggtgggctatggctctcagttccttgtggaagcgcttggtctaaggtgcagaggtgttagcgggatgaagcaaaagtgtccgattgtaacaagatatgttgatcctacgtaaggatattaaagtatgtattcatcactaatataatcagtgtattccaatatgtactacgatttccaatgtctttattgtcgccgtatgtaatcggcgtcacaaaataatccccggtgactttcttttaatccaggatgaaataatatgttattataatttttgcgatttggtccgttataggaattgaagtgtgcttgaggtcggtcgccaccactcccatttcataattttacatgtatttgaaaaataaaaatttatggtattcaatttaaacacgtatacttgtaaagaatgatatcttgaaagaaatatagtttaaatatttattgataaaataacaagtcaggtattatagtccaagcaaaaacataaatttattgatgcaagtttaaattcagaaatatttcaataactgattatatcagctggtacattgccgtagatgaaagactgagtgcgatattatggtgtaatacataggaattcgtttaaacgatctgcgtctaattttcggtccaacttgcacaggaaagacgtcgaccgcggtagctcttgcccagcagactgggcttccagtcctttcgctcgatcgggtccaatgttgtcctcagctgtgaaccggaagcggacgaccaacagtggaagaactgaaaggaacgagccgtctataccttgatgatcggcctctggtgaagggtatcatcgcagccaagcaagctcatgaaaggctgatgggggaggtgtataattatgaggcccacggcgggcttattctttagggaggatctatctcgttgctcaagtgcatggcgcaaagcagttattggagtgcggattttcgttggcatattattcgccacgagttagcagacgaagagaccttcatgaacgtggccaaggccagagttaagcagatgttacgccctgctgcaggcctttctattatccaatagttggttgatctttggaaagagcctcggctgaggcccatactgaaagagatcgatggatatcgatatgccatgttgtttgctagccagaaccagatcacatccgatatgctattgcagcttgacgcagatatggaggataagttgattcatgggatcgctcaggagtagctcatccatgcacgccgacaagaacagaaattccgtcgagttaacgcagccgcttacgacggattcgaaggtcatccattcggaatgtattagtttgcaccagctccgcgtcacacctgtcttcatttgaataagatgttagcaattgtttttagctttgtcttgttgtggcagggcggcaagtgcttcagacatcattctgttttcaaattttatgctggagaacagcttcttaattcctttggaaataatagactgcgtcttaaaattcagatgtctggatatagatatgattgtaaaataacctatttaagtgtcatttagaacataagttttatgaatgttcttccattttcgtcatcgaacgaataagagtaaatacaccttttttaacattacaaataagttcttatacgttgtttatacaccgggaatcatttccattattttcgcgcaaaagtcacggatattcgtgaaagcgacataaactgcgaaatttgcggggagtgtcttgagtttgcctcgaggctagcgcatgcacatagacacacacatcatctcattgatgcttggtaataattgtcattagattgtttttatgcatagatgcactcgaaatcagccaattttagacaagtatcaaacggatgtgacttcagtacattaaaaacgtccgcaatgtgttattaagttgtctaagcgtcaatttgatttacaattgaatatatcctgccccagccagccaacagctcgatttacaattgaatatatcctgccggccggcccacgcgtgtcgaggaattctgatctggcccccatttggacgtgaatgtagacacgtcgaaataaagatttccgaattagaataatttgtttattgctttcgcctataaatacgacggatcgtaatttgtcgttttatcaaaatgtactttcattttataataacgctgcggacatctacatttttgaattgaaaaaaaattggtaattactctttctttttctccatattgaccatcatactcattgctgatccatgtagatttcccggacatgaagccatttacaattgaatatatcctgccgccgctgccgctttgcacccggtggagcttgcatgttggtttctacgcagaactgagccggttaggcagataatttccattgagaactgagccatgtgcaccttccccccaacacggtgagcgacggggcaacggagtgatccacatgggacttttaaacatcatccgtcggatggcgttgcgagagaagcagtcgatccgtgagatcagccgacgcaccgggcaggcgcgcaacacgatcgcaaagtatttgaacgcaggtacaatcgagccgacgttcacgcggaacgaccaagcaagcttggctgccatttttggggtgaggccgttcgcggccgaggggcgcagcccctggggggatgggaggcccgcgttagcgggccgggagggttcgagaagggggggcaccccccttcggcgtgcgcggtcacgcgcacagggcgcagccctggttaaaaacaaggtttataaatattggtttaaaagcaggttaaaagacaggttagcggtggccgaaaaacgggcggaaacccttgcaaatgctggattttctgcctgtggacagcccctcaaatgtcaataggtgcgcccctcatctgtcagcactctgcccctcaagtgtcaaggatcgcgcccctcatctgtcagtagtcgcgcccctcaagtgtcaataccgcagggcacttatccccaggcttgtccacatcatctgtgggaaactcgcgtaaaatcaggcgttttcgccgatttgcgaggctggccagctccacgtcgccggccgaaatcgagcctgcccctcatctgtcaacgccgcgccgggtgagtcggcccctcaagtgtcaacgtccgcccctcatctgtcagtgagggccaagttttccgcgaggtatccacaacgccggcggccgcggtgtctcgcacacggcttcgacggcgtttctggcgcgtttgcagggccatagacggccgccagcccagcggcgagggcaaccagcccggtgagcgtcggaaagggtcgacggatcttttccgctgcataaccctgcttcggggtcattatagcgattttttcggtatatccatcctttttcgcacgatatacaggattttgccaaagggttcgtgtagactttccttggtgtatccaacggcgtcagccgggcaggataggtgaagtaggcccacccgcgagcgggtgttccttcttcactgtcccttattcgcacctggcggtgctcaacgggaatcctgctctgcgaggctggccggctaccgccggcgtaacagatgagggcaagcggatggctgatgaaaccaagccaaccaggaagggcagcccacctatcaaggtgtactgccttccagacgaacgaagagcgattgaggaaaaggcggcggcggccggcatgagcctgtcggcctacctgctggccgtcggccagggctacaaaatcacgggcgtcgtggactatgagcacgtccgcgagctggcccgcatcaatggcgacctgggccgcctgggcggcctgctgaaactctggctcaccgacgacccgcgcacggcgcggttcggtgatgccacgatcctcgccctgctggcgaagatcgaagagaagcaggacgagcttggcaaggtcatgatgggcgtggtccgcccgagggcagagccatgacttttttagccgctaaaacggccggggggtgcgcgtgattgccaagcacgtccccatgcgctccatcaagaagagcgacttcgcggagctggtattcgtgcagggcaagattcggaataccaagtacgagaaggacggccagacggtctacgggaccgacttcattgccgataaggtggattatctggacaccaaggcaccaggcgggtcaaatcaggaataagggcacattgccccggcgtgagtcggggcaatcccgcaaggagggtgaatgaatcggacgtttgaccggaaggcatacaggcaagaactgatcgacgcggggttttccgccgaggatgccgaaaccatcgcaagccgcaccgtcatgcgtgcgccccgcgaaaccttccagtccgtcggctcgatggtccagcaagctacggccaagatcgagcgcgacagcgtgcaactggctccccctgccctgcccgcgccatcggccgccgtggagcgttcgcgtcgtctcgaacaggaggcggcaggtttggcgaagtcgatgaccatcgacacgcgaggaactatgacgaccaagaagcgaaaaaccgccggcgaggacctggcaaaacaggtcagcgaggccaagcaggccgcgttgctgaaacacacgaagcagcagatcaaggaaatgcagctttccttgttcgatattgcgccgtggccggacacgatgcgagcgatgccaaacgacacggcccgctctgccctgttcaccacgcgcaacaagaaaatcccgcgcgaggcgctgcaaaacaaggtcattttccacgtcaacaaggacgtgaagatcacctacaccggcgtcgagctgcgggccgacgatgacgaactggtgtggcagcaggtgttggagtacgcgaagcgcacccctatcggcgagccgatcaccttcacgttctacgagctttgccaggacctgggctggtcgatcaatggccggtattacacgaaggccgaggaatgcctgtcgcgcctacaggcgacggcgatgggcttcacgtccgaccgcgttgggcacctggaatcggtgtcgctgctgcaccgcttccgcgtcctggaccgtggcaagaaaacgtcccgttgccaggtcctgatcgacgaggaaatcgtcgtgctgtttgctggcgaccactacacgaaattcatatgggagaagtaccgcaagctgtcgccgacggcccgacggatgttcgactatttcagctcgcaccgggagccgtacccgctcaagctggaaaccttccgcctcatgtgcggatcggattccacccgcgtgaagaagtggcgcgagcaggtcggcgaagcctgcgaagagttgcgaggcagcggcctggtggaacacgcctgggtcaatgatgacctggtgcattgcaaacgctagggccttgtggggtcagttccggctgggggttcagcagccagcgctttactggcatttcaggaacaagcgggcactgctcgacgcacttgcttcgctcagtatcgctcgggacgcacggcgcgctctacgaactgccgataaacagaggattaaaattgacaattgtgattaaggctcagattcgacggcttggagcggccgacgtgcaggatttccgcgagatccgattgtcggccctgaagaaagctccagagatgttcgggtccgtttacgagcacgaggagaaaaagcccatggaggcgttcgctgaacggttgcgagatgccgtggcattcggcgcctacatcgacggcgagatcattgggctgtcggtcttcaaacaggaggacggccccaaggacgctcacaaggcgcatctgtccggcgttttcgtggagcccgaacagcgaggccgaggggtcgccggtatgctgctgcgggcgttgccggcgggtttattgctcgtgatgatcgtccgacagattccaacgggaatctggtggatgcgcatcttcatcctcggcgcacttaatatttcgctattctggagcttgttgtttatttcggtctaccgcctgccgggcggggtcgcggcgacggtaggcgctgtgcagccgctgatggtcgtgttcatctctgccgctctgctaggtagcccgatacgattgatggcggtcctgggggctatttgcggaactgcgggcgtggcgctgttggtgttgacaccaaacgcagcgctagatcctgtcggcgtcgcagcgggcctggcgggggcggtttccatggcgttcggaaccgtgctgacccgcaagtggcaacctcccgtgcctctgctcacctttaccgcctggcaactggcggccggaggacttctgctcgttccagtagctttagtgtttgatccgccaatcccgatgcctacaggaaccaatgttctcggcctggcgtggctcggcctgatcggagcgggtttaacctacttcctttggttccgggggatctcgcgactcgaacctacagttgtttccttactgggctttctcagcccccgagcgcttagtgggaatttgtaccccttatcgaaccgggagcacaggatgacgcctaacaattcattcaagccgacaccgcttcgcggcgcggcttaattcaggagttaaacatcatgagggaagcggtgatcgccgaagtatcgactcaactatcagaggtagttggcgtcatcgagcgccatctcgaaccgacgttgctggccgtacatttgtacggctccgcagtggatggcggcctgaagccacacagtgatattgatttgctggttacggtgaccgtaaggcttgatgaaacaacgcggcgagctttgatcaacgaccttttggaaacttcggcttcccctggagagagcgagattctccgcgctgtagaagtcaccattgttgtgcacgacgacatcattccgtggcgttatccagctaagcgcgaactgcaatttggagaatggcagcgcaatgacattcttgcaggtatcttcgagccagccacgatcgacattgatctggctatcttgctgacaaaagcaagagaacatagcgttgccttggtaggtccagcggcggaggaactctttgatccggttcctgaacaggatctatttgaggcgctaaatgaaaccttaacgctatggaactcgccgcccgactgggctggcgatgagcgaaatgtagtgcttacgttgtcccgcatttggtacagcgcagtaaccggcaaaatcgcgccgaaggatgtcgctgccgactgggcaatggagcgcctgccggcccagtatcagcccgtcatacttgaagctaggcaggcttatcttggacaagaagatcgcttggcctcgcgcgcagatcagttggaagaatttgttcactacgtgaaaggcgagatcaccaaggtagtcggcaaataatgtctaacaattcgttcaagccgacgccgcttcgcggcgcggcttaactcaagcgttagagagctggggaagactatgcgcgatctgttgaaggtggttctaagcctcgtcttgcgatggcatttcgatccattcccattccgcgctcaagatggcttcccctcggcagttcatcagggctaaatcaatctagccgacttgtccggtgaaatgggctgcactccaacagaaacaatcaaacaaacatacacagcgacttattcacacgagctcaaattacaacggtatatatcctgccagtcagcatcatcacaccaaaagttaggcccgaatagtttgaaattagaaagctcgcaattgaggtctacaggccaaattcgctcttagccgtacaatattactcaccggatcctaaccggtttaattaaggcgcgccatgcccgggcaagcggccgcacaagttt

SEQ ID NO: 33 - DNA, 38811 bp, Artificial sequence
  plasmid pDAB7365
cttgtacaaagtggttgcggccgcttaattaaatttaaattcaattaatgcaatcttgattttcaacaacgaaggtaatggcgtaaaagaaaaaatgtatgttattgtattgatctttcatgatgttgaagcgtgccataatatgatgatgtataattaaaatattaactgtcgcattttattgaaatggcactgttatttcaaccatatctttgattctgttacatgacacgactgcaagaagtaaataatagacgccgttgttaaagaattgctatcatatgtgcctaactagagggaatttgagcgtcagacctaatcaaatattacaaaatatctcactctgtcgccagcaatggtgtaatcagcgcagacaaatggcgtaaagatcgcggaaaaacctccccgagtggcatgatagctgcctctgtattgctgatttagtcagccttatttgacttaagggtgccctcgttagtgacaaattgctttcaaggagacagccatgccccacactttgttgaaaaacaaattgcctttggggagacggtaaagccagttgctcttcaataaggaatgtcgaggaggcaatgtaaccgcctctggtagtacacttctctaatccaaaaatcaatttgtattcaagataccgcaaaaaacttatggtttaaaccctgcaggactagtccagaaggtaattatccaagatgtagcatcaagaatccaatgtttacgggaaaaactatggaagtattatgtaagctcagcaagaagcagatcaatatgcggcacatatgcaacctatgttcaaaaatgaagaatgtacagatacaagatcctatactgccagaatacgaagaagaatacgtagaaattgaaaaagaagaaccaggcgaagaaaagaatcttgaagacgtaagcactgacgacaacaatgaaaagaagaagataaggtcggtgattgtgaaagagacatagaggacacatgtaaggtggaaaatgtaagggcggaaagtaaccttatcacaaaggaatcttatcccccactacttatccttttatatttttccgtgtcatttttgcccttgagttttcctatataaggaaccaagttcggcatttgtgaaaacaagaaaaaatttggtgtaagctattttctttgaagtactgaggatacaacttcagagaaatttgtaagtttgtaggtaccagatctggatcccaaaccatgtctccggagaggagaccagttgagattaggccagctacagcagctgatatggccgcggtttgtgatatcgttaaccattacattgagacgtctacagtgaactttaggacagagccacaaacaccacaagagtggattgatgatctagagaggttgcaagatagatacccttggttggttgctgaggttgagggtgttgtggctggtattgcttacgctgggccctggaaggctaggaacgcttacgattggacagttgagagtactgtttacgtgtcacataggcatcaaaggttgggcctaggatctacattgtacacacatttgcttaagtctatggaggcgcaaggttttaagtctgtggttgctgttataggccttccaaacgatccatctgttaggttgcatgaggctttgggatacacagcccggggtacattgcgcgcagctggatacaagcatggtggatggcatgatgttggtttttggcaaagggattttgagttgccagctcctccaaggccagttaggccagttacccaaatctgagtagttagcttaatcacctagagctcgatcggcggcaatagcttcttagcgccatcccgggttgatcctatctgtgttgaaatagttgcggtgggcaaggctctctttcagaaagacaggcggccaaaggaacccaaggtgaggtgggctatggctctcagttccttgtggaagcgcttggtctaaggtgcagaggtgttagcgggatgaagcaaaagtgtccgattgtaacaagatatgttgatcctacgtaaggatattaaagtatgtattcatcactaatataatcagtgtattccaatatgtactacgatttccaatgtctttattgtcgccgtatgtaatcggcgtcacaaaataatccccggtgactttcttttaatccaggatgaaataatatgttattataatttttgcgatttggtccgttataggaattgaagtgtgcttgaggtcggtcgccaccactcccatttcataattttacatgtatttgaaaaataaaaatttatggtattcaatttaaacacgtatacttgtaaagaatgatatcttgaaagaaatatagtttaaatatttattgataaaataacaagtcaggtattatagtccaagcaaaaacataaatttattgatgcaagtttaaattcagaaatatttcaataactgattatatcagctggtacattgccgtagatgaaagactgagtgcgatattatggtgtaatacataggaattcgtttaaacgatctgcgtctaattttcggtccaacttgcacaggaaagacgtcgaccgcggtagctcttgcccagcagactgggcttccagtcctttcgctcgatcgggtccaatgttgtcctcagctgtgaaccggaagcggacgaccaacagtggaagaactgaaaggaacgagccgtctataccttgatgatcggcctctggtgaagggtatcatcgcagccaagcaagctcatgaaaggctgatgggggaggtgtataattatgaggcccacggcgggcttattctttagggaggatctatctcgttgctcaagtgcatggcgcaaagcagttattggagtgcggattttcgttggcatattattcgccacgagttagcagacgaagagaccttcatgaacgtggccaaggccagagttaagcagatgttacgccctgctgcaggcctttctattatccaatagttggttgatctttggaaagagcctcggctgaggcccatactgaaagagatcgatggatatcgatatgccatgttgtttgctagccagaaccagatcacatccgatatgctattgcagcttgacgcagatatggaggataagttgattcatgggatcgctcaggagtagctcatccatgcacgccgacaagaacagaaattccgtcgagttaacgcagccgcttacgacggattcgaaggtcatccattcggaatgtattagtttgcaccagctccgcgtcacacctgtcttcatttgaataagatgttagcaattgtttttagctttgtcttgttgtggcagggcggcaagtgcttcagacatcattctgttttcaaattttatgctggagaacagcttcttaattcctttggaaataatagactgcgtcttaaaattcagatgtctggatatagatatgattgtaaaataacctatttaagtgtcatttagaacataagttttatgaatgttcttccattttcgtcatcgaacgaataagagtaaatacaccttttttaacattacaaataagttcttatacgttgtttatacaccgggaatcatttccattattttcgcgcaaaagtcacggatattcgtgaaagcgacataaactgcgaaatttgcggggagtgtcttgagtttgcctcgaggctagcgcatgcacatagacacacacatcatctcattgatgcttggtaataattgtcattagattgtttttatgcatagatgcactcgaaatcagccaattttagacaagtatcaaacggatgtgacttcagtacattaaaaacgtccgcaatgtgttattaagttgtctaagcgtcaatttgatttacaattgaatatatcctgccccagccagccaacagctcgatttacaattgaatatatcctgccggccggcccacgcgtgtcgaggaattctgatctggcccccatttggacgtgaatgtagacacgtcgaaataaagatttccgaattagaataatttgtttattgctttcgcctataaatacgacggatcgtaatttgtcgttttatcaaaatgtactttcattttataataacgctgcggacatctacatttttgaattgaaaaaaaattggtaattactctttctttttctccatattgaccatcatactcattgctgatccatgtagatttcccggacatgaagccatttacaattgaatatatcctgccgccgctgccgctttgcacccggtggagcttgcatgttggtttctacgcagaactgagccggttaggcagataatttccattgagaactgagccatgtgcaccttccccccaacacggtgagcgacggggcaacggagtgatccacatgggacttttaaacatcatccgtcggatggcgttgcgagagaagcagtcgatccgtgagatcagccgacgcaccgggcaggcgcgcaacacgatcgcaaagtatttgaacgcaggtacaatcgagccgacgttcacgcggaacgaccaagcaagcttggctgccatttttggggtgaggccgttcgcggccgaggggcgcagcccctggggggatgggaggcccgcgttagcgggccgggagggttcgagaagggggggcaccccccttcggcgtgcgcggtcacgcgcacagggcgcagccctggttaaaaacaaggtttataaatattggtttaaaagcaggttaaaagacaggttagcggtggccgaaaaacgggcggaaacccttgcaaatgctggattttctgcctgtggacagcccctcaaatgtcaataggtgcgcccctcatctgtcagcactctgcccctcaagtgtcaaggatcgcgcccctcatctgtcagtagtcgcgcccctcaagtgtcaataccgcagggcacttatccccaggcttgtccacatcatctgtgggaaactcgcgtaaaatcaggcgttttcgccgatttgcgaggctggccagctccacgtcgccggccgaaatcgagcctgcccctcatctgtcaacgccgcgccgggtgagtcggcccctcaagtgtcaacgtccgcccctcatctgtcagtgagggccaagttttccgcgaggtatccacaacgccggcggccgcggtgtctcgcacacggcttcgacggcgtttctggcgcgtttgcagggccatagacggccgccagcccagcggcgagggcaaccagcccggtgagcgtcggaaagggtcgacggatcttttccgctgcataaccctgcttcggggtcattatagcgattttttcggtatatccatcctttttcgcacgatatacaggattttgccaaagggttcgtgtagactttccttggtgtatccaacggcgtcagccgggcaggataggtgaagtaggcccacccgcgagcgggtgttccttcttcactgtcccttattcgcacctggcggtgctcaacgggaatcctgctctgcgaggctggccggctaccgccggcgtaacagatgagggcaagcggatggctgatgaaaccaagccaaccaggaagggcagcccacctatcaaggtgtactgccttccagacgaacgaagagcgattgaggaaaaggcggcggcggccggcatgagcctgtcggcctacctgctggccgtcggccagggctacaaaatcacgggcgtcgtggactatgagcacgtccgcgagctggcccgcatcaatggcgacctgggccgcctgggcggcctgctgaaactctggctcaccgacgacccgcgcacggcgcggttcggtgatgccacgatcctcgccctgctggcgaagatcgaagagaagcaggacgagcttggcaaggtcatgatgggcgtggtccgcccgagggcagagccatgacttttttagccgctaaaacggccggggggtgcgcgtgattgccaagcacgtccccatgcgctccatcaagaagagcgacttcgcggagctggtattcgtgcagggcaagattcggaataccaagtacgagaaggacggccagacggtctacgggaccgacttcattgccgataaggtggattatctggacaccaaggcaccaggcgggtcaaatcaggaataagggcacattgccccggcgtgagtcggggcaatcccgcaaggagggtgaatgaatcggacgtttgaccggaaggcatacaggcaagaactgatcgacgcggggttttccgccgaggatgccgaaaccatcgcaagccgcaccgtcatgcgtgcgccccgcgaaaccttccagtccgtcggctcgatggtccagcaagctacggccaagatcgagcgcgacagcgtgcaactggctccccctgccctgcccgcgccatcggccgccgtggagcgttcgcgtcgtctcgaacaggaggcggcaggtttggcgaagtcgatgaccatcgacacgcgaggaactatgacgaccaagaagcgaaaaaccgccggcgaggacctggcaaaacaggtcagcgaggccaagcaggccgcgttgctgaaacacacgaagcagcagatcaaggaaatgcagctttccttgttcgatattgcgccgtggccggacacgatgcgagcgatgccaaacgacacggcccgctctgccctgttcaccacgcgcaacaagaaaatcccgcgcgaggcgctgcaaaacaaggtcattttccacgtcaacaaggacgtgaagatcacctacaccggcgtcgagctgcgggccgacgatgacgaactggtgtggcagcaggtgttggagtacgcgaagcgcacccctatcggcgagccgatcaccttcacgttctacgagctttgccaggacctgggctggtcgatcaatggccggtattacacgaaggccgaggaatgcctgtcgcgcctacaggcgacggcgatgggcttcacgtccgaccgcgttgggcacctggaatcggtgtcgctgctgcaccgcttccgcgtcctggaccgtggcaagaaaacgtcccgttgccaggtcctgatcgacgaggaaatcgtcgtgctgtttgctggcgaccactacacgaaattcatatgggagaagtaccgcaagctgtcgccgacggcccgacggatgttcgactatttcagctcgcaccgggagccgtacccgctcaagctggaaaccttccgcctcatgtgcggatcggattccacccgcgtgaagaagtggcgcgagcaggtcggcgaagcctgcgaagagttgcgaggcagcggcctggtggaacacgcctgggtcaatgatgacctggtgcattgcaaacgctagggccttgtggggtcagttccggctgggggttcagcagccagcgctttactggcatttcaggaacaagcgggcactgctcgacgcacttgcttcgctcagtatcgctcgggacgcacggcgcgctctacgaactgccgataaacagaggattaaaattgacaattgtgattaaggctcagattcgacggcttggagcggccgacgtgcaggatttccgcgagatccgattgtcggccctgaagaaagctccagagatgttcgggtccgtttacgagcacgaggagaaaaagcccatggaggcgttcgctgaacggttgcgagatgccgtggcattcggcgcctacatcgacggcgagatcattgggctgtcggtcttcaaacaggaggacggccccaaggacgctcacaaggcgcatctgtccggcgttttcgtggagcccgaacagcgaggccgaggggtcgccggtatgctgctgcgggcgttgccggcgggtttattgctcgtgatgatcgtccgacagattccaacgggaatctggtggatgcgcatcttcatcctcggcgcacttaatatttcgctattctggagcttgttgtttatttcggtctaccgcctgccgggcggggtcgcggcgacggtaggcgctgtgcagccgctgatggtcgtgttcatctctgccgctctgctaggtagcccgatacgattgatggcggtcctgggggctatttgcggaactgcgggcgtggcgctgttggtgttgacaccaaacgcagcgctagatcctgtcggcgtcgcagcgggcctggcgggggcggtttccatggcgttcggaaccgtgctgacccgcaagtggcaacctcccgtgcctctgctcacctttaccgcctggcaactggcggccggaggacttctgctcgttccagtagctttagtgtttgatccgccaatcccgatgcctacaggaaccaatgttctcggcctggcgtggctcggcctgatcggagcgggtttaacctacttcctttggttccgggggatctcgcgactcgaacctacagttgtttccttactgggctttctcagcccccgagcgcttagtgggaatttgtaccccttatcgaaccgggagcacaggatgacgcctaacaattcattcaagccgacaccgcttcgcggcgcggcttaattcaggagttaaacatcatgagggaagcggtgatcgccgaagtatcgactcaactatcagaggtagttggcgtcatcgagcgccatctcgaaccgacgttgctggccgtacatttgtacggctccgcagtggatggcggcctgaagccacacagtgatattgatttgctggttacggtgaccgtaaggcttgatgaaacaacgcggcgagctttgatcaacgaccttttggaaacttcggcttcccctggagagagcgagattctccgcgctgtagaagtcaccattgttgtgcacgacgacatcattccgtggcgttatccagctaagcgcgaactgcaatttggagaatggcagcgcaatgacattcttgcaggtatcttcgagccagccacgatcgacattgatctggctatcttgctgacaaaagcaagagaacatagcgttgccttggtaggtccagcggcggaggaactctttgatccggttcctgaacaggatctatttgaggcgctaaatgaaaccttaacgctatggaactcgccgcccgactgggctggcgatgagcgaaatgtagtgcttacgttgtcccgcatttggtacagcgcagtaaccggcaaaatcgcgccgaaggatgtcgctgccgactgggcaatggagcgcctgccggcccagtatcagcccgtcatacttgaagctaggcaggcttatcttggacaagaagatcgcttggcctcgcgcgcagatcagttggaagaatttgttcactacgtgaaaggcgagatcaccaaggtagtcggcaaataatgtctaacaattcgttcaagccgacgccgcttcgcggcgcggcttaactcaagcgttagagagctggggaagactatgcgcgatctgttgaaggtggttctaagcctcgtcttgcgatggcatttcgatccattcccattccgcgctcaagatggcttcccctcggcagttcatcagggctaaatcaatctagccgacttgtccggtgaaatgggctgcactccaacagaaacaatcaaacaaacatacacagcgacttattcacacgagctcaaattacaacggtatatatcctgccagtcagcatcatcacaccaaaagttaggcccgaatagtttgaaattagaaagctcgcaattgaggtctacaggccaaattcgctcttagccgtacaatattactcaccggatcctaaccggtttaattaaggcgcgccatgcccgggcaagcggccgcacaagtttgtacaaaaaagcaggcttctagacctagctaggtggagtcatcacgcagactatctcagcatgtgcgtagcacgcggccgcagcttatagtaaagatttttttgttaataaaatgaaagttaatatttatggatttatttgaacatatttacaagtttttgttaataaatttatttacagaagtgttaaatttgaaaatgtgttaaatgagagttaatatttatggatataatattactttatttaaaaataaaatgaatttatattaaaatatgatttggtaaaagatattataaagaggaacttggatgagaaagacgacgatgggcaaaagttgcatggcacaccgcttttgttcagtaacatctgcactgtggcgcctttttcacactcaccatgcatgctgccacgtcagctttcacactatgacaccactggccatacacgttgccacctcagctttctcctcttctcactatgacacgactggccatgcatgcatgcatgctgccacctcagctcccgcctcttcacccgtgtctttctctcatgtcgcagtgctgcgtgccaacctcttctctctataaatagagagaagagaatgatggttaaactcaaaccaaaacaagaaaacatacacaaatagcaaaacggatccacaaccaaaaatggcggcccgtctgcaggagcaaaagggaggcgagatggatacccgcattgccatcatcggcatgtcggccatcctcccctgcggcacgaccgtgcgcgagtcgtgggagaccatccgcgccggcatcgactgcctgtcggatctccccgaggaccgcgtcgacgtgacggcgtactttgaccccgtcaagaccaccaaggacaagatctactgcaagcgcggtggcttcattcccgagtacgactttgacgcccgcgagttcggactcaacatgttccagatggaggactcggacgcaaaccagaccatctcgcttctcaaggtcaaggaggccctccaggacgccggcatcgacgccctcggcaaggaaaagaagaacatcggctgcgtgctcggcattggcggcggccaaaagtccagccacgagttctactcgcgccttaattatgttgtcgtggagaaggtcctccgcaagatgggcatgcccgaggaggacgtcaaggtcgccgtcgaaaagtacaaggccaacttccccgagtggcgcctcgactccttccctggcttcctcggcaacgtcaccgccggtcgctgcaccaacaccttcaacctcgacggcatgaactgcgttgtcgacgccgcatgcgcctcgtccctcatcgccgtcaaggtcgccatcgacgagctgctctacggtgactgcgacatgatggtcaccggtgccacctgcacggataactccatcggcatgtacatggccttctccaagacccccgtgttctccacggaccccagcgtgcgcgcctacgacgaaaagacaaagggcatgctcatcggcgagggctccgccatgctcgtcctcaagcgctacgccgacgccgtccgcgacggcgatgagatccacgctgttattcgcggctgcgcctcctccagtgatggcaaggccgccggcatctacacgcccaccatttcgggccaggaggaggccctccgccgcgcctacaaccgcgcctgtgtcgacccggccaccgtcactctcgtcgagggtcacggcaccggtactcccgttggcgaccgcatcgagctcaccgccttgcgcaacctctttgacaaggcctacggcgagggcaacaccgaaaaggtcgctgtgggcagcatcaagtccagcatcggccatctcaaggccgtcgccggtctcgccggtatgatcaaggtcatcatggcgctcaagcacaagactctcccgggcaccatcaacgtcgacaacccacccaacctctacgacaacacgcccatcaacgagtcctcgctctacattaacaccatgaaccgcccctggttcccgccccctggtgtgccccgccgcgccggcatttcgagctttggctttggtggcgccaactaccacgccgtcctcgaggaggccgagcccgagcacacgaccgcgtaccgcctcaacaagcgcccgcagcccgtgctcatgatggccgccacgcccgcggccctccagtcgctctgcgaggcccagctcaaggagttcgaggccgccatcaaggagaacgagaccgtcaagaacaccgcctacatcaagtgcgtcaagttcggcgagcagttcaaattccctggctccatcccggccacaaacgcgcgcctcggcttcctcgtcaaggatgctgaggatgcctgctccaccctccgtgccatctgcgcccaattcgccaaggatgtcaccaaggaggcctggcgcctcccccgcgagggcgtcagcttccgcgccaagggcatcgccaccaacggcgctgtcgccgcgctcttctccggccagggcgcgcagtacacgcacatgtttagcgaggtggccatgaactggccccagttccgccagagcattgccgccatggacgccgcccagtccaaggtcgctggaagcgacaaggactttgagcgcgtctcccaggtcctctacccgcgcaagccgtacgagcgtgagcccgagcaggaccacaagaagatctccctcaccgcctactcgcagccctcgaccctggcctgcgctctcggtgcctttgagatcttcaaggaggccggcttcaccccggactttgccgccggccattcgctcggtgagttcgccgccctctacgccgcgggctgcgtcgaccgcgacgagctctttgagcttgtctgccgccgcgcccgcatcatgggcggcaaggacgcaccggccacccccaagggctgcatggccgccgtcattggccccaacgccgagaacatcaaggtccaggccgccaacgtctggctcggcaactccaactcgccttcgcagaccgtcatcaccggctccgtcgaaggtatccaggccgagagcgcccgcctccagaaggagggcttccgcgtcgtgcctcttgcctgcgagagcgccttccactcgccccagatggagaacgcctcgtcggccttcaaggacgtcatctccaaggtctccttccgcacccccaaggccgagaccaagctcttcagcaacgtctctggcgagacctaccccacggacgcccgcgagatgcttacgcagcacatgaccagcagcgtcaagttcctcacccaggtccgcaacatgcaccaggccggtgcgcgcatctttgtcgagttcggacccaagcaggtgctctccaagcttgtctccgagaccctcaaggatgacccctcggttgtcaccgtctctgtcaacccggcctcgggcacggattcggacatccagctccgcgacgcggccgtccagctcgttgtcgctggcgtcaaccttcagggctttgacaagtgggacgcccccgatgccacccgcatgcaggccatcaagaagaagcgcactaccctccgcctttcggccgccacctacgtctcggacaagaccaagaaggtccgcgacgccgccatgaacgatggccgctgcgtcacctacctcaagggcgccgcaccgctcatcaaggccccggagcccgttgtcgacgaggccgccaagcgcgaggccgagcgtctccagaaggagcttcaggatgcccagcgccagctcgacgacgccaagcgcgccgccgccgaggccaactccaagctcgccgctgccaaggaggaggccaagaccgccgctgcttcggccaagcccgcagttgacactgctgttgtcgaaaagcatcgtgccatcctcaagtccatgctcgcggagctcgatggctacggatcggtcgacgcttcttccctccagcagcagcagcagcagcagacggcccccgccccggtcaaggctgctgcgcctgccgcccccgttgcctcggcccctgccccggctgtctcgaacgagcttcttgagaaggccgagactgtcgtcatggaggtcctcgccgccaagaccggctacgagaccgacatgatcgaggctgacatggagctcgagaccgagctcggcattgactccatcaagcgtgtcgagatcctctccgaggtccaggccatgctcaatgtcgaggccaaggatgtcgatgccctcagccgcactcgcactgttggtgaggttgtcaacgccatgaaggccgagatcgctggcagctctgccccggcgcctgctgccgctgctccggctccggccaaggctgcccctgccgccgctgcgcctgctgtctcgaacgagcttctcgagaaggccgagaccgtcgtcatggaggtcctcgccgccaagactggctacgagactgacatgatcgagtccgacatggagctcgagactgagctcggcattgactccatcaagcgtgtcgagatcctctccgaggttcaggccatgctcaacgtcgaggccaaggacgtcgacgctctcagccgcactcgcactgtgggtgaggtcgtcaacgccatgaaggctgagatcgctggtggctctgccccggcgcctgccgccgctgccccaggtccggctgctgccgcccctgcgcctgccgccgccgcccctgctgtctcgaacgagcttcttgagaaggccgagaccgtcgtcatggaggtcctcgccgccaagactggctacgagactgacatgatcgagtccgacatggagctcgagaccgagctcggcattgactccatcaagcgtgtcgagattctctccgaggtccaggccatgctcaacgtcgaggccaaggacgtcgacgctctcagccgcacccgcactgttggcgaggtcgtcgatgccatgaaggccgagatcgctggtggctctgccccggcgcctgccgccgctgctcctgctccggctgctgccgcccctgcgcctgccgcccctgcgcctgctgtctcgagcgagcttctcgagaaggccgagactgtcgtcatggaggtcctcgccgccaagactggctacgagactgacatgatcgagtccgacatggagctcgagaccgagctcggcattgactccatcaagcgtgtcgagattctctccgaggtccaggccatgctcaacgtcgaggccaaggacgtcgacgctctcagccgcacccgcactgttggcgaggtcgtcgatgccatgaaggccgagatcgctggtggctctgccccggcgcctgccgccgctgctcctgctccggctgctgccgcccctgcgcctgccgcccctgcgcctgccgcccctgcgcctgctgtctcgagcgagcttctcgagaaggccgagactgtcgtcatggaggtcctcgccgccaagactggctacgagactgacatgattgagtccgacatggagctcgagaccgagctcggcattgactccatcaagcgtgtcgagattctctccgaggttcaggccatgctcaacgtcgaggccaaggacgtcgacgctctcagccgcactcgcactgttggtgaggtcgtcgatgccatgaaggctgagatcgctggcagctccgcctcggcgcctgccgccgctgctcctgctccggctgctgccgctcctgcgcccgctgccgccgcccctgctgtctcgaacgagcttctcgagaaagccgagactgtcgtcatggaggtcctcgccgccaagactggctacgagactgacatgatcgagtccgacatggagctcgagactgagctcggcattgactccatcaagcgtgtcgagatcctctccgaggttcaggccatgctcaacgtcgaggccaaggacgtcgatgccctcagccgcacccgcactgttggcgaggttgtcgatgccatgaaggccgagatcgctggtggctctgccccggcgcctgccgccgctgcccctgctccggctgccgccgcccctgctgtctcgaacgagcttctcgagaaggccgagactgtcgtcatggaggtcctcgccgccaagactggctacgagaccgacatgatcgagtccgacatggagctcgagaccgagctcggcattgactccatcaagcgtgtcgagattctctccgaggttcaggccatgctcaacgtcgaggccaaggacgtcgatgctctcagccgcactcgcactgttggcgaggtcgtcgatgccatgaaggctgagatcgccggcagctccgccccggcgcctgccgccgctgctcctgctccggctgctgccgctcctgcgcccgctgccgctgcccctgctgtctcgagcgagcttctcgagaaggccgagaccgtcgtcatggaggtcctcgccgccaagactggctacgagactgacatgattgagtccgacatggagctcgagactgagctcggcattgactccatcaagcgtgtcgagatcctctccgaggttcaggccatgctcaacgtcgaggccaaggacgtcgatgccctcagccgcacccgcactgttggcgaggttgtcgatgccatgaaggccgagatcgctggtggctctgccccggcgcctgccgccgctgcccctgctccggctgccgccgcccctgctgtctcgaacgagcttcttgagaaggccgagaccgtcgtcatggaggtcctcgccgccaagactggctacgagaccgacatgatcgagtccgacatggagctcgagaccgagctcggcattgactccatcaagcgtgtcgagattctctccgaggttcaggccatgctcaacgtcgaggccaaggacgtcgacgctctcagccgcactcgcactgttggcgaggtcgtcgatgccatgaaggctgagatcgctggtggctctgccccggcgcctgccgccgctgctcctgcctcggctggcgccgcgcctgcggtcaagattgactcggtccacggcgctgactgtgatgatctttccctgatgcacgccaaggtggttgacatccgccgcccggacgagctcatcctggagcgccccgagaaccgccccgttctcgttgtcgatgacggcagcgagctcaccctcgccctggtccgcgtcctcggcgcctgcgccgttgtcctgacctttgagggtctccagctcgctcagcgcgctggtgccgctgccatccgccacgtgctcgccaaggatctttccgcggagagcgccgagaaggccatcaaggaggccgagcagcgctttggcgctctcggcggcttcatctcgcagcaggcggagcgcttcgagcccgccgaaatcctcggcttcacgctcatgtgcgccaagttcgccaaggcttccctctgcacggctgtggctggcggccgcccggcctttatcggtgtggcgcgccttgacggccgcctcggattcacttcgcagggcacttctgacgcgctcaagcgtgcccagcgtggtgccatctttggcctctgcaagaccatcggcctcgagtggtccgagtctgacgtcttttcccgcggcgtggacattgctcagggcatgcaccccgaggatgccgccgtggcgattgtgcgcgagatggcgtgcgctgacattcgcattcgcgaggtcggcattggcgcaaaccagcagcgctgcacgatccgtgccgccaagctcgagaccggcaacccgcagcgccagatcgccaaggacgacgtgctgctcgtttctggcggcgctcgcggcatcacgcctctttgcatccgggagatcacgcgccagatcgcgggcggcaagtacattctgcttggccgcagcaaggtctctgcgagcgaaccggcatggtgcgctggcatcactgacgagaaggctgtgcaaaaggctgctacccaggagctcaagcgcgcctttagcgctggcgagggccccaagcccacgccccgcgctgtcactaagcttgtgggctctgttcttggcgctcgcgaggtgcgcagctctattgctgcgattgaagcgctcggcggcaaggccatctactcgtcgtgcgacgtgaactctgccgccgacgtggccaaggccgtgcgcgatgccgagtcccagctcggtgcccgcgtctcgggcatcgttcatgcctcgggcgtgctccgcgaccgtctcatcgagaagaagctccccgacgagttcgacgccgtctttggcaccaaggtcaccggtctcgagaacctcctcgccgccgtcgaccgcgccaacctcaagcacatggtcctcttcagctcgctcgccggcttccacggcaacgtcggccagtctgactacgccatggccaacgaggcccttaacaagatgggcctcgagctcgccaaggacgtctcggtcaagtcgatctgcttcggtccctgggacggtggcatggtgacgccgcagctcaagaagcagttccaggagatgggcgtgcagatcatcccccgcgagggcggcgctgataccgtggcgcgcatcgtgctcggctcctcgccggctgagatccttgtcggcaactggcgcaccccgtccaagaaggtcggctcggacaccatcaccctgcaccgcaagatttccgccaagtccaaccccttcctcgaggaccacgtcatccagggccgccgcgtgctgcccatgacgctggccattggctcgctcgcggagacctgcctcggcctcttccccggctactcgctctgggccattgacgacgcccagctcttcaagggtgtcactgtcgacggcgacgtcaactgcgaggtgaccctcaccccgtcgacggcgccctcgggccgcgtcaacgtccaggccacgctcaagaccttttccagcggcaagctggtcccggcctaccgcgccgtcatcgtgctctccaaccagggcgcgcccccggccaacgccaccatgcagccgccctcgctcgatgccgatccggcgctccagggctccgtctacgacggcaagaccctcttccacggcccggccttccgcggcatcgatgacgtgctctcgtgcaccaagagccagcttgtggccaagtgcagcgctgtccccggctccgacgccgctcgcggcgagtttgccacggacactgacgcccatgaccccttcgtgaacgacctggcctttcaggccatgctcgtctgggtgcgccgcacgctcggccaggctgcgctccccaactcgatccagcgcatcgtccagcaccgcccggtcccgcaggacaagcccttctacattaccctccgctccaaccagtcgggcggtcactcccagcacaagcacgcccttcagttccacaacgagcagggcgatctcttcattgatgtccaggcttcggtcatcgccacggacagccttgccttctaaatctaaactaggccatggtgacttaaggtagttagcttaatcacttaggtcacccagtccaagcccggcctagcacgatgatcatgagtgttgctattgatgtatgttaatactatacacagtcatcgtgtgtgttttataaaactgtaagcttaggatgtttgaggctaatgtaattagcactacaccgtaataaatgagaggtttactttatgttttaataatgttcttacccttgctgctctctaaactgtaatggcgtacggttagctaaactaaagtaaaaatcgattcgcttgagtaaaattagtgaccgggaaagatcatcgactactactgctcagagatgtaatcggtaattaagacttcaagctcaataattaattaggagtaaatctggcttcgaatttttaaattgtcaacttccaaagaaggattggcaagactcaatctcaattgcccaacaaacatatggctctttacaaatttggaatctctttttgatggcaagaacgtcgtaattcctctgtcgatctcatgtaattaccaaactcatctacttattactttctttatatgcacttactgatgcggccgcttaattaagatgagtgatactcaggactcaggactcactctgctgatcactagtgctagcctcgaggtcgacacaactttgtatacaaaagttgtctagacctagctaggctcagcaactcatccagtcaagttcgagtcagtgagttgggcggccgcagcttatagtaaagatttttttgttaataaaatgaaagttaatatttatggatttatttgaacatatttacaagtttttgttaataaatttatttacagaagtgttaaatttgaaaatgtgttaaatgagagttaatatttatggatataatattactttatttaaaaataaaatgaatttatattaaaatatgatttggtaaaagatattataaagaggaacttggatgagaaagacgacgatgggcaaaagttgcatggcacaccgcttttgttcagtaacatctgcactgtggcgcctttttcacactcaccatgcatgctgccacgtcagctttcacactatgacaccactggccatacacgttgccacctcagctttctcctcttctcactatgacacgactggccatgcatgcatgcatgctgccacctcagctcccgcctcttcacccgtgtctttctctcatgtcgcagtgctgcgtgccaacctcttctctctataaatagagagaagagaatgatggttaaactcaaaccaaaacaagaaaacatacacaaatagcaaaacggatccacaaccaaaaatggccgctcgcaacgtgtctgcagcgcatgagatgcacgatgaaaagcgcatcgccgtcgtcggcatggccgtccagtacgccggatgcaaaaccaaggacgagttctgggaggtgctcatgaacggcaaggtcgagtccaaggtgatcagcgacaaacgactcggctccaactaccgcgccgagcactacaaagcagagcgcagcaagtatgccgacaccttttgcaacgaaacgtacggcacccttgacgagaacgagatcgacaacgagcacgaactcctcctcaacctcgccaagcaggcactcgcagagacatccgtcaaagactcgacacgctgcggcatcgtcagcggctgcctctcgttccccatggacaacctccagggtgaactcctcaacgtgtaccaaaaccatgtcgagaaaaagctcggggcccgcgtcttcaaggacgcctcccattggtccgaacgcgagcagtccaacaaacccgaggccggtgaccgccgcatcttcatggacccggcctccttcgtcgccgaagaactcaacctcggcgcccttcactactccgtcgacgcagcatgcgccacggcgctctacgtgctccgcctcgcgcaggatcatctcgtctccggcgccgccgacgtcatgctctgcggtgccacctgcctgccggagccctttttcatcctttcgggcttttccaccttccaggccatgcccgtcggcacgggccagaacgtgtccatgccgctgcacaaggacagccagggcctcaccccgggtgagggcggctccatcatggtcctcaagcgtctcgatgatgccatccgcgacggcgaccacatctacggcacccttctcggcgccaatgtcagcaactccggcacaggtctgcccctcaagccccttctccccagcgagaaaaagtgcctcatggacacctacacgcgcattaacgtgcacccgcacaagattcagtacgtcgagtgccacgccaccggcacgccccagggtgatcgtgtggaaatcgacgccgtcaaggcctgctttgaaggcaaggtcccccgtttcggtaccacaaagggcaactttggacacaccctcgtcgcagccggctttgccggtatgtgcaaggtcctcctctccatgaagcatggcatcatcccgcccaccccgggtatcgatgacgagaccaagatggaccctctcgtcgtctccggtgaggccatcccatggccagagaccaacggcgagcccaagcgcgccggtctctcggcctttggctttggtggcaccaacgcccatgccgtctttgaggagcatgacccctccaacgccgcctgcacgggccacgactccatttctgcgctctcggcccgctgcggcggtgaaagcaacatgcgcatcgccatcactggtatggacgccacctttggcgctctcaagggactcgacgccttcgagcgcgccatttacaccggcgctcacggtgccatcccactcccagaaaagcgctggcgctttctcggcaaggacaaggactttcttgacctctgcggcgtcaaggccaccccgcacggctgctacattgaagatgttgaggtcgacttccagcgcctccgcacgcccatgacccctgaagacatgctcctccctcagcagcttctggccgtcaccaccattgaccgcgccatcctcgactcgggaatgaaaaagggtggcaatgtcgccgtctttgtcggcctcggcaccgacctcgagctctaccgtcaccgtgctcgcgtcgctctcaaggagcgcgtccgccctgaagcctccaagaagctcaatgacatgatgcagtacattaacgactgcggcacatccacatcgtacacctcgtacattggcaacctcgtcgccacgcgcgtctcgtcgcagtggggcttcacgggcccctcctttacgatcaccgagggcaacaactccgtctaccgctgcgccgagctcggcaagtacctcctcgagaccggcgaggtcgatggcgtcgtcgttgcgggtgtcgatctctgcggcagtgccgaaaacctttacgtcaagtctcgccgcttcaaggtgtccacctccgataccccgcgcgccagctttgacgccgccgccgatggctactttgtcggcgagggctgcggtgcctttgtgctcaagcgtgagactagctgcaccaaggacgaccgtatctacgcttgcatggatgccatcgtccctggcaacgtccctagcgcctgcttgcgcgaggccctcgaccaggcgcgcgtcaagccgggcgatatcgagatgctcgagctcagcgccgactccgcccgccacctcaaggacccgtccgtcctgcccaaggagctcactgccgaggaggaaatcggcggccttcagacgatccttcgtgacgatgacaagctcccgcgcaacgtcgcaacgggcagtgtcaaggccaccgtcggtgacaccggttatgcctctggtgctgccagcctcatcaaggctgcgctttgcatctacaaccgctacctgcccagcaacggcgacgactgggatgaacccgcccctgaggcgccctgggacagcaccctctttgcgtgccagacctcgcgcgcttggctcaagaaccctggcgagcgtcgctatgcggccgtctcgggcgtctccgagacgcgctcgtgctattccgtgctcctctccgaagccgagggccactacgagcgcgagaaccgcatctcgctcgacgaggaggcgcccaagctcattgtgcttcgcgccgactcccacgaggagatccttggtcgcctcgacaagatccgcgagcgcttcttgcagcccacgggcgccgccccgcgcgagtccgagctcaaggcgcaggcccgccgcatcttcctcgagctcctcggcgagacccttgcccaggatgccgcttcttcaggctcgcaaaagcccctcgctctcagcctcgtctccacgccctccaagctccagcgcgaggtcgagctcgcggccaagggtatcccgcgctgcctcaagatgcgccgcgattggagctcccctgctggcagccgctacgcgcctgagccgctcgccagcgaccgcgtcgccttcatgtacggcgaaggtcgcagcccttactacggcatcacccaagacattcaccgcatttggcccgaactccacgaggtcatcaacgaaaagacgaaccgtctctgggccgaaggcgaccgctgggtcatgccgcgcgccagcttcaagtcggagctcgagagccagcagcaagagtttgatcgcaacatgattgaaatgttccgtcttggaatcctcacctcaattgccttcaccaatctggcgcgcgacgttctcaacatcacgcccaaggccgcctttggcctcagtcttggcgagatttccatgatttttgccttttccaagaagaacggtctcatctccgaccagctcaccaaggatcttcgcgagtccgacgtgtggaacaaggctctggccgttgaatttaatgcgctgcgcgaggcctggggcattccacagagtgtccccaaggacgagttctggcaaggctacattgtgcgcggcaccaagcaggatatcgaggcggccatcgccccggacagcaagtacgtgcgcctcaccatcatcaatgatgccaacaccgccctcattagcggcaagcccgacgcctgcaaggctgcgatcgcgcgtctcggtggcaacattcctgcgcttcccgtgacccagggcatgtgcggccactgccccgaggtgggaccttataccaaggatatcgccaagatccatgccaaccttgagttccccgttgtcgacggccttgacctctggaccacaatcaaccagaagcgcctcgtgccacgcgccacgggcgccaaggacgaatgggccccttcttcctttggcgagtacgccggccagctctacgagaagcaggctaacttcccccaaatcgtcgagaccatttacaagcaaaactacgacgtctttgtcgaggttgggcccaacaaccaccgtagcaccgcagtgcgcaccacgcttggtccccagcgcaaccaccttgctggcgccatcgacaagcagaacgaggatgcttggacgaccatcgtcaagcttgtggcttcgctcaaggcccaccttgttcctggcgtcacgatctcgccgctgtaccactccaagcttgtggcggaggctgaggcttgctacgctgcgctctgcaagggtgaaaagcccaagaagaacaagtttgtgcgcaagattcagctcaacggtcgcttcaacagcaaggcggaccccatctcctcggccgatcttgccagctttccgcctgcggaccctgccattgaagccgccatctcgagccgcatcatgaagccggttgctccgaagttctacgcgcgtctcaacattgacgagcaggacgagacccgtgatccgatcctcaacaaggacaacgcgccgtcttccagctctagctcctcttccagctcttccagctcttccagcccgtcgccagctccgtccgccccagtgcaaaagaaggctgctccggccgcggagaccaaggctgttgcttcggctgacgcacttcgcagtgccctgctcgatctcgacagtatgcttgcgctgagctctgccagtgcctccggcaaccttgttgagactgcgcctagcgacgcctcggtcattgtgccgccctgcaacattgcggatctcggcagccgcgccttcatgaaaacgtacggtgtttcggcgcctctgtacacgggcgccatggccaagggcattgcctctgcggacctcgtcattgccgccggccgccagggcatccttgcgtcctttggcgccggcggacttcccatgcaggttgtgcgtgagtccatcgaaaagattcaggccgccctgcccaatggcccgtacgctgtcaaccttatccattctccctttgacagcaacctcgaaaagggcaatgtcgatctcttcctcgagaagggtgtcacctttgtcgaggcctcggcctttatgacgctcaccccgcaggtcgtgcggtaccgcgcggctggcctcacgcgcaacgccgacggctcggtcaacatccgcaaccgtatcattggcaaggtctcgcgcaccgagctcgccgagatgttcatgcgtcctgcgcccgagcaccttcttcagaagctcattgcttccggcgagatcaaccaggagcaggccgagctcgcccgccgtgttcccgtcgctgacgacatcgcggtcgaagctgactcgggtggccacaccgacaaccgccccatccacgtcattctgcccctcatcatcaaccttcgcgaccgccttcaccgcgagtgcggctacccggccaaccttcgcgtccgtgtgggcgccggcggtggcattgggtgcccccaggcggcgctggccaccttcaacatgggtgcctcctttattgtcaccggcaccgtgaaccaggtcgccaagcagtcgggcacgtgcgacaatgtgcgcaagcagctcgcgaaggccacttactcggacgtatgcatggccccggctgccgacatgttcgaggaaggcgtcaagcttcaggtcctcaagaagggaaccatgtttccctcgcgcgccaacaagctctacgagctcttttgcaagtacgactcgttcgagtccatgccccccgcagagcttgcgcgcgtcgagaagcgcatcttcagccgcgcgctcgaagaggtctgggacgagaccaaaaacttttacattaaccgtcttcacaacccggagaagatccagcgcgccgagcgcgaccccaagctcaagatgtcgctgtgctttcgctggtacctgagcctggcgagccgctgggccaacactggagcttccgatcgcgtcatggactaccaggtctggtgcggtcctgccattggttccttcaacgatttcatcaagggaacttaccttgatccggccgtcgcaaacgagtacccgtgcgtcgttcagattaacaagcagatccttcgtggagcgtgcttcttgcgccgtctcgaaattctgcgcaacgcacgcctttccgatggcgctgccgctcttgtggccagcatcgatgacacatacgtcccggccgagaagctgtaagcggccgcatttaaatggatccactaggccatggtgacttaaggtagttagcttaatcacttaggtcacccagtccaagcccggcctagcacgatgatcatgagtgttgctattgatgtatgttaatactatacacagtcatcgtgtgtgttttataaaactgtaagcttaggatgtttgaggctaatgtaattagcactacaccgtaataaatgagaggtttactttatgttttaataatgttcttacccttgctgctctctaaactgtaatggcgtacggttagctaaactaaagtaaaaatcgattcgcttgagtaaaattagtgaccgggaaagatcatcgactactactgctcagagatgtaatcggtaattaagacttcaagctcaataattaattaggagtaaatctggcttcgaatttttaaattgtcaacttccaaagaaggattggcaagactcaatctcaattgcccaacaaacatatggctctttacaaatttggaatctctttttgatggcaagaacgtcgtaattcctctgtcgatctcatgtaattaccaaactcatctacttattactttctttatatgcacttactgatgcggccgcttaattaatctgacctgaccactagacctgagtgagtacagatgtgctactagtgctagcctcgaggtcgaccaacttttctatacaaagttgtctagacctagctaggactaggcactgagtgactcactgacctgactgagtgactggcggccgcagcttatagtaaagatttttttgttaataaaatgaaagttaatatttatggatttatttgaacatatttacaagtttttgttaataaatttatttacagaagtgttaaatttgaaaatgtgttaaatgagagttaatatttatggatataatattactttatttaaaaataaaatgaatttatattaaaatatgatttggtaaaagatattataaagaggaacttggatgagaaagacgacgatgggcaaaagttgcatggcacaccgcttttgttcagtaacatctgcactgtggcgcctttttcacactcaccatgcatgctgccacgtcagctttcacactatgacaccactggccatacacgttgccacctcagctttctcctcttctcactatgacacgactggccatgcatgcatgcatgctgccacctcagctcccgcctcttcacccgtgtctttctctcatgtcgcagtgctgcgtgccaacctcttctctctataaatagagagaagagaatgatggttaaactcaaaccaaaacaagaaaacatacacaaatagcaaaacggatccacaaccaaaacatatggcgctccgtgtcaagacgaacaagaagccatgctgggagatgaccaaggaggagctgaccagcggcaagaccgaggtgttcaactatgaggaactcctcgagttcgcagagggcgacatcgccaaggtcttcggacccgagttcgccgtcatcgacaagtacccgcgccgcgtgcgcctgcccgcccgcgagtacctgctcgtgacccgcgtcaccctcatggacgccgaggtcaacaactaccgcgtcggcgcccgcatggtcaccgagtacgatctccccgtcaacggagagctctccgagggcggagactgcccctgggccgtcctggtcgagagtggccagtgcgatctcatgctcatctcctacatgggcattgacttccagaaccagggcgaccgcgtctaccgcctgctcaacaccacgctcaccttttacggcgtggcccacgagggcgagaccctcgagtacgacattcgcgtcaccggcttcgccaagcgtctcgacggcggcatctccatgttcttcttcgagtacgactgctacgtcaacggccgcctcctcatcgagatgcgcgatggctgcgccggcttcttcaccaacgaggagctcgacgccggcaagggcgtcgtcttcacccgcggcgacctcgccgcccgcgccaagatcccaaagcaggacgtctccccctacgccgtcgccccctgcctccacaagaccaagctcaacgaaaaggagatgcagaccctcgtcgacaaggactgggcatccgtctttggctccaagaacggcatgccggaaatcaactacaaactctgcgcgcgtaagatgctcatgattgaccgcgtcaccagcattgaccacaagggcggtgtctacggcctcggtcagctcgtcggtgaaaagatcctcgagcgcgaccactggtactttccctgccactttgtcaaggatcaggtcatggccggatccctcgtctccgacggctgcagccagatgctcaagatgtacatgatctggctcggcctccacctcaccaccggaccctttgacttccgcccggtcaacggccaccccaacaaggtccgctgccgcggccaaatctccccgcacaagggcaagctcgtctacgtcatggagatcaaggagatgggcttcgacgaggacaacgacccgtacgccattgccgacgtcaacatcattgatgtcgacttcgaaaagggccaggactttagcctcgaccgcatcagcgactacggcaagggcgacctcaacaagaagatcgtcgtcgactttaagggcatcgctctcaagatgcagaagcgctccaccaacaagaacccctccaaggttcagcccgtctttgccaacggcgccgccactgtcggccccgaggcctccaaggcttcctccggcgccagcgccagcgccagcgccgccccggccaagcctgccttcagcgccgatgttcttgcgcccaagcccgttgcccttcccgagcacatcctcaagggcgacgccctcgcccccaaggagatgtcctggcaccccatggcccgcatcccgggcaacccgacgccctcttttgcgccctcggcctacaagccgcgcaacatcgcctttacgcccttccccggcaaccccaacgataacgaccacaccccgggcaagatgccgctcacctggttcaacatggccgagttcatggccggcaaggtcagcatgtgcctcggccccgagttcgccaagttcgacgactcgaacaccagccgcagccccgcttgggacctcgctctcgtcacccgcgccgtgtctgtgtctgacctcaagcacgtcaactaccgcaacatcgacctcgacccctccaagggtaccatggtcggcgagttcgactgccccgcggacgcctggttctacaagggcgcctgcaacgatgcccacatgccgtactcgatcctcatggagatcgccctccagacctcgggtgtgctcacctcggtgctcaaggcgcccctgaccatggagaaggacgacatcctcttccgcaacctcgacgccaacgccgagttcgtgcgcgccgacctcgactaccgcggcaagactatccgcaacgtcaccaagtgcactggctacagcatgctcggcgagatgggcgtccaccgcttcacctttgagctctacgtcgatgatgtgctcttttacaagggctcgacctcgttcggctggttcgtgcccgaggtctttgccgcccaggccggcctcgacaacggccgcaagtcggagccctggttcattgagaacaaggttccggcctcgcaggtctcctcctttgacgtgcgccccaacggcagcggccgcaccgccatcttcgccaacgcccccagcggcgcccagctcaaccgccgcacggaccagggccagtacctcgacgccgtcgacattgtctccggcagcggcaagaagagcctcggctacgcccacggttccaagacggtcaacccgaacgactggttcttctcgtgccacttttggtttgactcggtcatgcccggaagtctcggtgtcgagtccatgttccagctcgtcgaggccatcgccgcccacgaggatctcgctggcaagcacggcattgccaaccccacctttgtgcacgccccgggcaagatcagctggaagtaccgcggccagctcacgcccaagagcaagaagatggactcggaggtccacatcgtgtccgtggacgcccacgacggcgttgtcgacctcgtcgccgacggcttcctctgggccgacagcctccgcgtctactcggtgagcaacattcgcgtgcgcatcgcctccggtgaggcccctgccgccgcctcctccgccgcctctgtgggctcctcggcttcgtccgtcgagcgcacgcgctcgagccccgctgtcgcctccggcccggcccagaccatcgacctcaagcagctcaagaccgagctcctcgagctcgatgccccgctctacctctcgcaggacccgaccagcggccagctcaagaagcacaccgacgtggcctccggccaggccaccatcgtgcagccctgcacgctcggcgacctcggtgaccgctccttcatggagacctacggcgtcgtcgccccgctgtacacgggcgccatggccaagggcattgcctcggcggacctcgtcatcgccgccggcaagcgcaagatcctcggctcctttggcgccggcggcctccccatgcaccacgtgcgcgccgccctcgagaagatccaggccgccctgcctcagggcccctacgccgtcaacctcatccactcgccttttgacagcaacctcgagaagggcaacgtcgatctcttcctcgagaagggcgtcactgtggtggaggcctcggcattcatgaccctcaccccgcaggtcgtgcgctaccgcgccgccggcctctcgcgcaacgccgacggttcggtcaacatccgcaaccgcatcatcggcaaggtctcgcgcaccgagctcgccgagatgttcatccgcccggccccggagcacctcctcgagaagctcatcgcctcgggcgagatcacccaggagcaggccgagctcgcgcgccgcgttcccgtcgccgacgatatcgctgtcgaggctgactcgggcggccacaccgacaaccgccccatccacgtcatcctcccgctcatcatcaacctccgcaaccgcctgcaccgcgagtgcggctaccccgcgcacctccgcgtccgcgttggcgccggcggtggcgtcggctgcccgcaggccgccgccgccgcgctcaccatgggcgccgccttcatcgtcaccggcactgtcaaccaggtcgccaagcagtccggcacctgcgacaacgtgcgcaagcagctctcgcaggccacctactcggatatctgcatggccccggccgccgacatgttcgaggagggcgtcaagctccaggtcctcaagaagggaaccatgttcccctcgcgcgccaacaagctctacgagctcttttgcaagtacgactccttcgactccatgcctcctgccgagctcgagcgcatcgagaagcgtatcttcaagcgcgcactccaggaggtctgggaggagaccaaggacttttacattaacggtctcaagaacccggagaagatccagcgcgccgagcacgaccccaagctcaagatgtcgctctgcttccgctggtaccttggtcttgccagccgctgggccaacatgggcgccccggaccgcgtcatggactaccaggtctggtgtggcccggccattggcgccttcaacgacttcatcaagggcacctacctcgaccccgctgtctccaacgagtacccctgtgtcgtccagatcaacctgcaaatcctccgtggtgcctgctacctgcgccgtctcaacgccctgcgcaacgacccgcgcattgacctcgagaccgaggatgctgcctttgtctacgagcccaccaacgcgctctaagctagcatttaaatctaggccatggtgacttaaggtagttagcttaatcacttaggtcacccagtccaagcccggcctagcacgatgatcatgagtgttgctattgatgtatgttaatactatacacagtcatcgtgtgtgttttataaaactgtaagcttaggatgtttgaggctaatgtaattagcactacaccgtaataaatgagaggtttactttatgttttaataatgttcttacccttgctgctctctaaactgtaatggcgtacggttagctaaactaaagtaaaaatcgattcgcttgagtaaaattagtgaccgggaaagatcatcgactactactgctcagagatgtaatcggtaattaagacttcaagctcaataattaattaggagtaaatctggcttcgaatttttaaattgtcaacttccaaagaaggattggcaagactcaatctcaattgcccaacaaacatatatggctctttacaaatttggaatctctttttgatggcaagaacgtcgtaattcctctgtcgatctcatgtaattaccaaactcatctacttattactttctttatatgcacttactgatgcggccgcttaattaatcacgagtggatgactgtcacgactgactcatgactgactactagtgctagcctcgaggtcgacacaactttgtataataaagttgtctagacctaggcgagtcatgagtcgtgacatgacgtcatgctcatcagactgcggccgcagcttatagtaaagatttttttgttaataaaatgaaagttaatatttatggatttatttgaacatatttacaagtttttgttaataaatttatttacagaagtgttaaatttgaaaatgtgttaaatgagagttaatatttatggatataatattactttatttaaaaataaaatgaatttatattaaaatatgatttggtaaaagatattataaagaggaacttggatgagaaagacgacgatgggcaaaagttgcatggcacaccgcttttgttcagtaacatctgcactgtggcgcctttttcacactcaccatgcatgctgccacgtcagctttcacactatgacaccactggccatacacgttgccacctcagctttctcctcttctcactatgacacgactggccatgcatgcatgcatgctgccacctcagctcccgcctcttcacccgtgtctttctctcatgtcgcagtgctgcgtgccaacctcttctctctataaatagagagaagagaatgatggttaaactcaaaccaaaacaagaaaacatacacaaatagcaaaacggatccacaaccaacctaccatggctcccactcccgacgccaccgcgcctctgaacaagccgagcgactatgccgtctaccacgaggaagacggccccttctggaccgccgattccagcggcgtctcgcgcgtgaactttagcgagaccggcgtgggatccgagggcgtcatccctgcgctcacgctcatcgacgtcttcgagagggccgtcaagcgcggcggaaacaggatcgccttccgcacggaaaacatgcccacgctccgccgcggcgaagaggccccggacgcgctgccgctcaaggactggaagtcctggtcctggaaacagtacaaggccgacgtccaccgcatcgccagggctctcatggacctcggcgttgagcagcatgacgccgtctccatttttggctttaactcgcccgaatggtttctcagtgccgtcggcgccgtgcacgcaggtgccaagattgccggcatttacccctcagacacgcccgcccaggtccagtacaaggccttccacagtgacaccgctgttgccgttgtcgaaaacgagcagtgcttcaagaagttcgccgaggtcgtcgaggaccttccttacctcaaggccattgtttgctgggactatgaagccacagacatcacgcgcgaggacggctccgtcgtcgaggtcctcacctttgccgagttcctcaagcgcggcgacaccgtcgaggcggccgcccttgacgagcgcatctccaagatcgagcccaccatgtgcgctgcccttatttacaccagcggtactaccggccgccccaaggccgttatgatttcgcacgacaaccttgttttcgaggccagcgccgtcgtccccaacctcggaggagcctgtacgaccactgctgaggagcgcattctctcgtacctgcctctctcgcacgtcgctggtatgatggttgatattattgcccccatcattgccaccgccttccacaagggccgcatctgcgtctgctttgctcgcccgtacgatttgcgcaccggcacgctgggccagcgcctcaacgccgtggagcccaccatcttccttggcgtgccccgtgtgtgggaaaagattcaggaaaagctcatggccgtcggtgccaaaaccaccggcctcaagaagaagctctctacggccgccaagaagcgtggtcttgaattccaggaggagcagcaaatcggccgctccggtgccaaccctggctttggcccccttggcatctacaagaagctcctcggcctcatcaagggcaagctgggcctcaccaagtgcaagtttgcctttgctggtgccgcgcccatgacccgtgagacccttcagtactttggcgcgctgaacatcaacattaacgaggtctacggcatgtccgagtgctccggtgccgccacctggtccacggacaaggcccacgagtggggcactgttggctacgagatgcccagttgcgaggtccgcgtcttcaagattgccgaggacggtaccaagaccgagtgcccgcgcgccgccgacattatgcatgctaccgaggaggagcagggcgaagtttgcttccgcggccgtaacatcatgatgggctaccttgccaaccccaagcttggcgacgaccacgttgccgagatcgaggagaagaacgctgccgctatcgactccgagggctggctccacagtggtgataagggcgccatttctacccgcggcatgctcaagatcacgggccgctacaaggagctcatcatcggcgccggtggcgagaacgtggcgcccgtccctattgaggacgccatcaaggcgcgcatgccttttgtttccaacgccatgatggtcggagataagcgcaagttcatggctgtcctccttaccctcaagacggttggcgccacgggcgagcttcccggtacgaacaagctcatgggcgctgccgccgactatggtgagaccatcgaggacgcctgcgacaacgaggcgctcattgaggagatcacgcagcagctcaaggagatcggtgatgatggcgatgtcacgccctcgaacgcggctcgcatccaaaagttcaccattctcccgctcgacttttccgtctccacggacgagctcacggccacgctcaagctcaagcgctccgtggtcgcagacaagtacgaagacatcatcgaggccttttacgagtccaagagcgtttttgtgccgtactcgaccgttggcgcctacgccacgggcggcccggtcgacgactccgttgtcgatggctccttcaagggcgactttagcatgattggcgacgatgatccggatcttcaaaacgtcgatgtcctcgaggcgattgacgaggacaattaaatttccagtccaagcccggcctagcacgatgatcatgagtgttgctattgatgtatgttaatactatacacagtcatcgtgtgtgttttataaaactgtaagcttaggatgtttgaggctaatgtaattagcactacaccgtaataaatgagaggtttactttatgttttaataatgttcttacccttgctgctctctaaactgtaatggcgtacggttagctaaactaaagtaaaaatcgattcgcttgagtaaaattagtgaccgggaaagatcatcgactactactgctcagagatgtaatcggtaattaagacttcaagctcaataattaattaggagtaaatctggcttcgaatttttaaattgtcaacttccaaagaaggattggcaagactcaatctcaattgcccaacaaacatatggctctttacaaatttggaatctctttttgatggcaagaacgtcgtaattcctctgtcgatctcatgtaattaccaaactcatctacttattactttctttatatgcacttactgatgcggccgcttaattaatctgatcatggatgctacgtcacggcagtacaggactatcactagagtcactggtcacatcagcggccgcagcttatagtaaagatttttttgttaataaaatgaaagttaatatttatggatttatttgaacatatttacaagtttttgttaataaatttatttacagaagtgttaaatttgaaaatgtgttaaatgagagttaatatttatggatataatattactttatttaaaaataaaatgaatttatattaaaatatgatttggtaaaagatattataaagaggaacttggatgagaaagacgacgatgggcaaaagttgcatggcacaccgcttttgttcagtaacatctgcactgtggcgcctttttcacactcaccatgcatgctgccacgtcagctttcacactatgacaccactggccatacacgttgccacctcagctttctcctcttctcactatgacacgactggccatgcatgcatgcatgctgccacctcagctcccgcctcttcacccgtgtctttctctcatgtcgcagtgctgcgtgccaacctcttctctctataaatagagagaagagaatgatggttaaactcaaaccaaaacaagaaaacatacacaaatagcaaaacggatccacaaccaaaaatgttgcagcatacttggctaccaaaacccccaaatttaaccttattgtcagatgaagttcatctctggcgcattccccttgaccaaccagaatcacagctacaggatttagccgctaccttatctagtgacgaattagcccgtgcaaacagattttattttcccgaacatcgccggcgttttactgctggtcgtggtattctccgcagtatcttggggggctatttgggtgtggaaccagggcaagttaaatttgattatgaatcccgtggtaaaccaatattaggcgatcgctttgccgagagtggtttattatttaacttgtcacactcccagaacttggccttgtgtgcagtcaattacacgcgccaaatcggcatcgatttagaatatctccgccccacatctgatttagaatcccttgccaaaaggttctttttaccgcgagaatatgaattattgcgatcgctacccgatgagcaaaaacaaaaaattttctttcgttactggacttgtaaagaggcttatcttaaagcaacgggtgacggcatcgctaaattagaggaaattgaaatagcactaactcccacagaaccagctaagttacagacagctccagcgtggagtctcctagagctagtgccagatgataattgtgttgctgctgttgccgtggcgggttttggctggcagccaaaattctggcattattgagtagttagcttaatcacttaggtcacccagtccaagcccggcctagcacgatgatcatgagtgttgctattgatgtatgttaatactatacacagtcatcgtgtgtgttttataaaactgtaagcttaggatgtttgaggctaatgtaattagcactacaccgtaataaatgagaggtttactttatgttttaataatgttcttacccttgctgctctctaaactgtaatggcgtacggttagctaaactaaagtaaaaatcgattcgcttgagtaaaattagtgaccgggaaagatcatcgactactactgctcagagatgtaatcggtaattaagacttcaagctcaataattaattaggagtaaatctggcttcgaatttttaaattgtcaacttccaaagaaggattggcaagactcaatctcaattgcccaacaaacatatggctctttacaaatttggaatctctttttgatggcaagaacgtcgtaattcctctgtcgatctcatgtaattaccaaactcatctacttattactttctttatatgcacttactgatgcctagtgctagcctcgaggtcgacacccagcttt

SEQ ID NO: 34 - DNA, 35302 bp, Artificial sequence
  plasmid pDAB7368
ttgtacaaagtggttgcggccgcttaattaaatttaaattcaattaatgcaatcttgattttcaacaacgaaggtaatggcgtaaaagaaaaaatgtatgttattgtattgatctttcatgatgttgaagcgtgccataatatgatgatgtataattaaaatattaactgtcgcattttattgaaatggcactgttatttcaaccatatctttgattctgttacatgacacgactgcaagaagtaaataatagacgccgttgttaaagaattgctatcatatgtgcctaactagagggaatttgagcgtcagacctaatcaaatattacaaaatatctcactctgtcgccagcaatggtgtaatcagcgcagacaaatggcgtaaagatcgcggaaaaacctccccgagtggcatgatagctgcctctgtattgctgatttagtcagccttatttgacttaagggtgccctcgttagtgacaaattgctttcaaggagacagccatgccccacactttgttgaaaaacaaattgcctttggggagacggtaaagccagttgctcttcaataaggaatgtcgaggaggcaatgtaaccgcctctggtagtacacttctctaatccaaaaatcaatttgtattcaagataccgcaaaaaacttatggtttaaaccctgcaggactagtccagaaggtaattatccaagatgtagcatcaagaatccaatgtttacgggaaaaactatggaagtattatgtaagctcagcaagaagcagatcaatatgcggcacatatgcaacctatgttcaaaaatgaagaatgtacagatacaagatcctatactgccagaatacgaagaagaatacgtagaaattgaaaaagaagaaccaggcgaagaaaagaatcttgaagacgtaagcactgacgacaacaatgaaaagaagaagataaggtcggtgattgtgaaagagacatagaggacacatgtaaggtggaaaatgtaagggcggaaagtaaccttatcacaaaggaatcttatcccccactacttatccttttatatttttccgtgtcatttttgcccttgagttttcctatataaggaaccaagttcggcatttgtgaaaacaagaaaaaatttggtgtaagctattttctttgaagtactgaggatacaacttcagagaaatttgtaagtttgtaggtaccagatctggatcccaaaccatgtctccggagaggagaccagttgagattaggccagctacagcagctgatatggccgcggtttgtgatatcgttaaccattacattgagacgtctacagtgaactttaggacagagccacaaacaccacaagagtggattgatgatctagagaggttgcaagatagatacccttggttggttgctgaggttgagggtgttgtggctggtattgcttacgctgggccctggaaggctaggaacgcttacgattggacagttgagagtactgtttacgtgtcacataggcatcaaaggttgggcctaggatctacattgtacacacatttgcttaagtctatggaggcgcaaggttttaagtctgtggttgctgttataggccttccaaacgatccatctgttaggttgcatgaggctttgggatacacagcccggggtacattgcgcgcagctggatacaagcatggtggatggcatgatgttggtttttggcaaagggattttgagttgccagctcctccaaggccagttaggccagttacccaaatctgagtagttagcttaatcacctagagctcgatcggcggcaatagcttcttagcgccatcccgggttgatcctatctgtgttgaaatagttgcggtgggcaaggctctctttcagaaagacaggcggccaaaggaacccaaggtgaggtgggctatggctctcagttccttgtggaagcgcttggtctaaggtgcagaggtgttagcgggatgaagcaaaagtgtccgattgtaacaagatatgttgatcctacgtaaggatattaaagtatgtattcatcactaatataatcagtgtattccaatatgtactacgatttccaatgtctttattgtcgccgtatgtaatcggcgtcacaaaataatccccggtgactttcttttaatccaggatgaaataatatgttattataatttttgcgatttggtccgttataggaattgaagtgtgcttgaggtcggtcgccaccactcccatttcataattttacatgtatttgaaaaataaaaatttatggtattcaatttaaacacgtatacttgtaaagaatgatatcttgaaagaaatatagtttaaatatttattgataaaataacaagtcaggtattatagtccaagcaaaaacataaatttattgatgcaagtttaaattcagaaatatttcaataactgattatatcagctggtacattgccgtagatgaaagactgagtgcgatattatggtgtaatacataggaattcgtttaaacgatctgcgtctaattttcggtccaacttgcacaggaaagacgtcgaccgcggtagctcttgcccagcagactgggcttccagtcctttcgctcgatcgggtccaatgttgtcctcagctgtgaaccggaagcggacgaccaacagtggaagaactgaaaggaacgagccgtctataccttgatgatcggcctctggtgaagggtatcatcgcagccaagcaagctcatgaaaggctgatgggggaggtgtataattatgaggcccacggcgggcttattctttagggaggatctatctcgttgctcaagtgcatggcgcaaagcagttattggagtgcggattttcgttggcatattattcgccacgagttagcagacgaagagaccttcatgaacgtggccaaggccagagttaagcagatgttacgccctgctgcaggcctttctattatccaatagttggttgatctttggaaagagcctcggctgaggcccatactgaaagagatcgatggatatcgatatgccatgttgtttgctagccagaaccagatcacatccgatatgctattgcagcttgacgcagatatggaggataagttgattcatgggatcgctcaggagtagctcatccatgcacgccgacaagaacagaaattccgtcgagttaacgcagccgcttacgacggattcgaaggtcatccattcggaatgtattagtttgcaccagctccgcgtcacacctgtcttcatttgaataagatgttagcaattgtttttagctttgtcttgttgtggcagggcggcaagtgcttcagacatcattctgttttcaaattttatgctggagaacagcttcttaattcctttggaaataatagactgcgtcttaaaattcagatgtctggatatagatatgattgtaaaataacctatttaagtgtcatttagaacataagttttatgaatgttcttccattttcgtcatcgaacgaataagagtaaatacaccttttttaacattacaaataagttcttatacgttgtttatacaccgggaatcatttccattattttcgcgcaaaagtcacggatattcgtgaaagcgacataaactgcgaaatttgcggggagtgtcttgagtttgcctcgaggctagcgcatgcacatagacacacacatcatctcattgatgcttggtaataattgtcattagattgtttttatgcatagatgcactcgaaatcagccaattttagacaagtatcaaacggatgtgacttcagtacattaaaaacgtccgcaatgtgttattaagttgtctaagcgtcaatttgatttacaattgaatatatcctgccccagccagccaacagctcgatttacaattgaatatatcctgccggccggcccacgcgtgtcgaggaattctgatctggcccccatttggacgtgaatgtagacacgtcgaaataaagatttccgaattagaataatttgtttattgctttcgcctataaatacgacggatcgtaatttgtcgttttatcaaaatgtactttcattttataataacgctgcggacatctacatttttgaattgaaaaaaaattggtaattactctttctttttctccatattgaccatcatactcattgctgatccatgtagatttcccggacatgaagccatttacaattgaatatatcctgccgccgctgccgctttgcacccggtggagcttgcatgttggtttctacgcagaactgagccggttaggcagataatttccattgagaactgagccatgtgcaccttccccccaacacggtgagcgacggggcaacggagtgatccacatgggacttttaaacatcatccgtcggatggcgttgcgagagaagcagtcgatccgtgagatcagccgacgcaccgggcaggcgcgcaacacgatcgcaaagtatttgaacgcaggtacaatcgagccgacgttcacgcggaacgaccaagcaagcttggctgccatttttggggtgaggccgttcgcggccgaggggcgcagcccctggggggatgggaggcccgcgttagcgggccgggagggttcgagaagggggggcaccccccttcggcgtgcgcggtcacgcgcacagggcgcagccctggttaaaaacaaggtttataaatattggtttaaaagcaggttaaaagacaggttagcggtggccgaaaaacgggcggaaacccttgcaaatgctggattttctgcctgtggacagcccctcaaatgtcaataggtgcgcccctcatctgtcagcactctgcccctcaagtgtcaaggatcgcgcccctcatctgtcagtagtcgcgcccctcaagtgtcaataccgcagggcacttatccccaggcttgtccacatcatctgtgggaaactcgcgtaaaatcaggcgttttcgccgatttgcgaggctggccagctccacgtcgccggccgaaatcgagcctgcccctcatctgtcaacgccgcgccgggtgagtcggcccctcaagtgtcaacgtccgcccctcatctgtcagtgagggccaagttttccgcgaggtatccacaacgccggcggccgcggtgtctcgcacacggcttcgacggcgtttctggcgcgtttgcagggccatagacggccgccagcccagcggcgagggcaaccagcccggtgagcgtcggaaagggtcgacggatcttttccgctgcataaccctgcttcggggtcattatagcgattttttcggtatatccatcctttttcgcacgatatacaggattttgccaaagggttcgtgtagactttccttggtgtatccaacggcgtcagccgggcaggataggtgaagtaggcccacccgcgagcgggtgttccttcttcactgtcccttattcgcacctggcggtgctcaacgggaatcctgctctgcgaggctggccggctaccgccggcgtaacagatgagggcaagcggatggctgatgaaaccaagccaaccaggaagggcagcccacctatcaaggtgtactgccttccagacgaacgaagagcgattgaggaaaaggcggcggcggccggcatgagcctgtcggcctacctgctggccgtcggccagggctacaaaatcacgggcgtcgtggactatgagcacgtccgcgagctggcccgcatcaatggcgacctgggccgcctgggcggcctgctgaaactctggctcaccgacgacccgcgcacggcgcggttcggtgatgccacgatcctcgccctgctggcgaagatcgaagagaagcaggacgagcttggcaaggtcatgatgggcgtggtccgcccgagggcagagccatgacttttttagccgctaaaacggccggggggtgcgcgtgattgccaagcacgtccccatgcgctccatcaagaagagcgacttcgcggagctggtattcgtgcagggcaagattcggaataccaagtacgagaaggacggccagacggtctacgggaccgacttcattgccgataaggtggattatctggacaccaaggcaccaggcgggtcaaatcaggaataagggcacattgccccggcgtgagtcggggcaatcccgcaaggagggtgaatgaatcggacgtttgaccggaaggcatacaggcaagaactgatcgacgcggggttttccgccgaggatgccgaaaccatcgcaagccgcaccgtcatgcgtgcgccccgcgaaaccttccagtccgtcggctcgatggtccagcaagctacggccaagatcgagcgcgacagcgtgcaactggctccccctgccctgcccgcgccatcggccgccgtggagcgttcgcgtcgtctcgaacaggaggcggcaggtttggcgaagtcgatgaccatcgacacgcgaggaactatgacgaccaagaagcgaaaaaccgccggcgaggacctggcaaaacaggtcagcgaggccaagcaggccgcgttgctgaaacacacgaagcagcagatcaaggaaatgcagctttccttgttcgatattgcgccgtggccggacacgatgcgagcgatgccaaacgacacggcccgctctgccctgttcaccacgcgcaacaagaaaatcccgcgcgaggcgctgcaaaacaaggtcattttccacgtcaacaaggacgtgaagatcacctacaccggcgtcgagctgcgggccgacgatgacgaactggtgtggcagcaggtgttggagtacgcgaagcgcacccctatcggcgagccgatcaccttcacgttctacgagctttgccaggacctgggctggtcgatcaatggccggtattacacgaaggccgaggaatgcctgtcgcgcctacaggcgacggcgatgggcttcacgtccgaccgcgttgggcacctggaatcggtgtcgctgctgcaccgcttccgcgtcctggaccgtggcaagaaaacgtcccgttgccaggtcctgatcgacgaggaaatcgtcgtgctgtttgctggcgaccactacacgaaattcatatgggagaagtaccgcaagctgtcgccgacggcccgacggatgttcgactatttcagctcgcaccgggagccgtacccgctcaagctggaaaccttccgcctcatgtgcggatcggattccacccgcgtgaagaagtggcgcgagcaggtcggcgaagcctgcgaagagttgcgaggcagcggcctggtggaacacgcctgggtcaatgatgacctggtgcattgcaaacgctagggccttgtggggtcagttccggctgggggttcagcagccagcgctttactggcatttcaggaacaagcgggcactgctcgacgcacttgcttcgctcagtatcgctcgggacgcacggcgcgctctacgaactgccgataaacagaggattaaaattgacaattgtgattaaggctcagattcgacggcttggagcggccgacgtgcaggatttccgcgagatccgattgtcggccctgaagaaagctccagagatgttcgggtccgtttacgagcacgaggagaaaaagcccatggaggcgttcgctgaacggttgcgagatgccgtggcattcggcgcctacatcgacggcgagatcattgggctgtcggtcttcaaacaggaggacggccccaaggacgctcacaaggcgcatctgtccggcgttttcgtggagcccgaacagcgaggccgaggggtcgccggtatgctgctgcgggcgttgccggcgggtttattgctcgtgatgatcgtccgacagattccaacgggaatctggtggatgcgcatcttcatcctcggcgcacttaatatttcgctattctggagcttgttgtttatttcggtctaccgcctgccgggcggggtcgcggcgacggtaggcgctgtgcagccgctgatggtcgtgttcatctctgccgctctgctaggtagcccgatacgattgatggcggtcctgggggctatttgcggaactgcgggcgtggcgctgttggtgttgacaccaaacgcagcgctagatcctgtcggcgtcgcagcgggcctggcgggggcggtttccatggcgttcggaaccgtgctgacccgcaagtggcaacctcccgtgcctctgctcacctttaccgcctggcaactggcggccggaggacttctgctcgttccagtagctttagtgtttgatccgccaatcccgatgcctacaggaaccaatgttctcggcctggcgtggctcggcctgatcggagcgggtttaacctacttcctttggttccgggggatctcgcgactcgaacctacagttgtttccttactgggctttctcagcccccgagcgcttagtgggaatttgtaccccttatcgaaccgggagcacaggatgacgcctaacaattcattcaagccgacaccgcttcgcggcgcggcttaattcaggagttaaacatcatgagggaagcggtgatcgccgaagtatcgactcaactatcagaggtagttggcgtcatcgagcgccatctcgaaccgacgttgctggccgtacatttgtacggctccgcagtggatggcggcctgaagccacacagtgatattgatttgctggttacggtgaccgtaaggcttgatgaaacaacgcggcgagctttgatcaacgaccttttggaaacttcggcttcccctggagagagcgagattctccgcgctgtagaagtcaccattgttgtgcacgacgacatcattccgtggcgttatccagctaagcgcgaactgcaatttggagaatggcagcgcaatgacattcttgcaggtatcttcgagccagccacgatcgacattgatctggctatcttgctgacaaaagcaagagaacatagcgttgccttggtaggtccagcggcggaggaactctttgatccggttcctgaacaggatctatttgaggcgctaaatgaaaccttaacgctatggaactcgccgcccgactgggctggcgatgagcgaaatgtagtgcttacgttgtcccgcatttggtacagcgcagtaaccggcaaaatcgcgccgaaggatgtcgctgccgactgggcaatggagcgcctgccggcccagtatcagcccgtcatacttgaagctaggcaggcttatcttggacaagaagatcgcttggcctcgcgcgcagatcagttggaagaatttgttcactacgtgaaaggcgagatcaccaaggtagtcggcaaataatgtctaacaattcgttcaagccgacgccgcttcgcggcgcggcttaactcaagcgttagagagctggggaagactatgcgcgatctgttgaaggtggttctaagcctcgtcttgcgatggcatttcgatccattcccattccgcgctcaagatggcttcccctcggcagttcatcagggctaaatcaatctagccgacttgtccggtgaaatgggctgcactccaacagaaacaatcaaacaaacatacacagcgacttattcacacgagctcaaattacaacggtatatatcctgccagtcagcatcatcacaccaaaagttaggcccgaatagtttgaaattagaaagctcgcaattgaggtctacaggccaaattcgctcttagccgtacaatattactcaccggatcctaaccggtttaattaaggcgcgccatgcccgggcaagcggccgcacaagtttgtacaaaaaagcaggcttctagacctagctaggtggagtcatcacgcagactatctcagcatgtgcgtagcacgcggccgcagcttatagtaaagatttttttgttaataaaatgaaagttaatatttatggatttatttgaacatatttacaagtttttgttaataaatttatttacagaagtgttaaatttgaaaatgtgttaaatgagagttaatatttatggatataatattactttatttaaaaataaaatgaatttatattaaaatatgatttggtaaaagatattataaagaggaacttggatgagaaagacgacgatgggcaaaagttgcatggcacaccgcttttgttcagtaacatctgcactgtggcgcctttttcacactcaccatgcatgctgccacgtcagctttcacactatgacaccactggccatacacgttgccacctcagctttctcctcttctcactatgacacgactggccatgcatgcatgcatgctgccacctcagctcccgcctcttcacccgtgtctttctctcatgtcgcagtgctgcgtgccaacctcttctctctataaatagagagaagagaatgatggttaaactcaaaccaaaacaagaaaacatacacaaatagcaaaacggatccacaaccaaaaatggcggcccgtctgcaggagcaaaagggaggcgagatggatacccgcattgccatcatcggcatgtcggccatcctcccctgcggcacgaccgtgcgcgagtcgtgggagaccatccgcgccggcatcgactgcctgtcggatctccccgaggaccgcgtcgacgtgacggcgtactttgaccccgtcaagaccaccaaggacaagatctactgcaagcgcggtggcttcattcccgagtacgactttgacgcccgcgagttcggactcaacatgttccagatggaggactcggacgcaaaccagaccatctcgcttctcaaggtcaaggaggccctccaggacgccggcatcgacgccctcggcaaggaaaagaagaacatcggctgcgtgctcggcattggcggcggccaaaagtccagccacgagttctactcgcgccttaattatgttgtcgtggagaaggtcctccgcaagatgggcatgcccgaggaggacgtcaaggtcgccgtcgaaaagtacaaggccaacttccccgagtggcgcctcgactccttccctggcttcctcggcaacgtcaccgccggtcgctgcaccaacaccttcaacctcgacggcatgaactgcgttgtcgacgccgcatgcgcctcgtccctcatcgccgtcaaggtcgccatcgacgagctgctctacggtgactgcgacatgatggtcaccggtgccacctgcacggataactccatcggcatgtacatggccttctccaagacccccgtgttctccacggaccccagcgtgcgcgcctacgacgaaaagacaaagggcatgctcatcggcgagggctccgccatgctcgtcctcaagcgctacgccgacgccgtccgcgacggcgatgagatccacgctgttattcgcggctgcgcctcctccagtgatggcaaggccgccggcatctacacgcccaccatttcgggccaggaggaggccctccgccgcgcctacaaccgcgcctgtgtcgacccggccaccgtcactctcgtcgagggtcacggcaccggtactcccgttggcgaccgcatcgagctcaccgccttgcgcaacctctttgacaaggcctacggcgagggcaacaccgaaaaggtcgctgtgggcagcatcaagtccagcatcggccatctcaaggccgtcgccggtctcgccggtatgatcaaggtcatcatggcgctcaagcacaagactctcccgggcaccatcaacgtcgacaacccacccaacctctacgacaacacgcccatcaacgagtcctcgctctacattaacaccatgaaccgcccctggttcccgccccctggtgtgccccgccgcgccggcatttcgagctttggctttggtggcgccaactaccacgccgtcctcgaggaggccgagcccgagcacacgaccgcgtaccgcctcaacaagcgcccgcagcccgtgctcatgatggccgccacgcccgcggccctccagtcgctctgcgaggcccagctcaaggagttcgaggccgccatcaaggagaacgagaccgtcaagaacaccgcctacatcaagtgcgtcaagttcggcgagcagttcaaattccctggctccatcccggccacaaacgcgcgcctcggcttcctcgtcaaggatgctgaggatgcctgctccaccctccgtgccatctgcgcccaattcgccaaggatgtcaccaaggaggcctggcgcctcccccgcgagggcgtcagcttccgcgccaagggcatcgccaccaacggcgctgtcgccgcgctcttctccggccagggcgcgcagtacacgcacatgtttagcgaggtggccatgaactggccccagttccgccagagcattgccgccatggacgccgcccagtccaaggtcgctggaagcgacaaggactttgagcgcgtctcccaggtcctctacccgcgcaagccgtacgagcgtgagcccgagcaggaccacaagaagatctccctcaccgcctactcgcagccctcgaccctggcctgcgctctcggtgcctttgagatcttcaaggaggccggcttcaccccggactttgccgccggccattcgctcggtgagttcgccgccctctacgccgcgggctgcgtcgaccgcgacgagctctttgagcttgtctgccgccgcgcccgcatcatgggcggcaaggacgcaccggccacccccaagggctgcatggccgccgtcattggccccaacgccgagaacatcaaggtccaggccgccaacgtctggctcggcaactccaactcgccttcgcagaccgtcatcaccggctccgtcgaaggtatccaggccgagagcgcccgcctccagaaggagggcttccgcgtcgtgcctcttgcctgcgagagcgccttccactcgccccagatggagaacgcctcgtcggccttcaaggacgtcatctccaaggtctccttccgcacccccaaggccgagaccaagctcttcagcaacgtctctggcgagacctaccccacggacgcccgcgagatgcttacgcagcacatgaccagcagcgtcaagttcctcacccaggtccgcaacatgcaccaggccggtgcgcgcatctttgtcgagttcggacccaagcaggtgctctccaagcttgtctccgagaccctcaaggatgacccctcggttgtcaccgtctctgtcaacccggcctcgggcacggattcggacatccagctccgcgacgcggccgtccagctcgttgtcgctggcgtcaaccttcagggctttgacaagtgggacgcccccgatgccacccgcatgcaggccatcaagaagaagcgcactaccctccgcctttcggccgccacctacgtctcggacaagaccaagaaggtccgcgacgccgccatgaacgatggccgctgcgtcacctacctcaagggcgccgcaccgctcatcaaggccccggagcccgttgtcgacgaggccgccaagcgcgaggccgagcgtctccagaaggagcttcaggatgcccagcgccagctcgacgacgccaagcgcgccgccgccgaggccaactccaagctcgccgctgccaaggaggaggccaagaccgccgctgcttcggccaagcccgcagttgacactgctgttgtcgaaaagcatcgtgccatcctcaagtccatgctcgcggagctcgatggctacggatcggtcgacgcttcttccctccagcagcagcagcagcagcagacggcccccgccccggtcaaggctgctgcgcctgccgcccccgttgcctcggcccctgccccggctgtctcgaacgagcttcttgagaaggccgagactgtcgtcatggaggtcctcgccgccaagaccggctacgagaccgacatgatcgaggctgacatggagctcgagaccgagctcggcattgactccatcaagcgtgtcgagatcctctccgaggtccaggccatgctcaatgtcgaggccaaggatgtcgatgccctcagccgcactcgcactgttggtgaggttgtcaacgccatgaaggccgagatcgctggcagctctgccccggcgcctgctgccgctgctccggctccggccaaggctgcccctgccgccgctgcgcctgctgtctcgaacgagcttctcgagaaggccgagaccgtcgtcatggaggtcctcgccgccaagactggctacgagactgacatgatcgagtccgacatggagctcgagactgagctcggcattgactccatcaagcgtgtcgagatcctctccgaggttcaggccatgctcaacgtcgaggccaaggacgtcgacgctctcagccgcactcgcactgtgggtgaggtcgtcaacgccatgaaggctgagatcgctggtggctctgccccggcgcctgccgccgctgccccaggtccggctgctgccgcccctgcgcctgccgccgccgcccctgctgtctcgaacgagcttcttgagaaggccgagaccgtcgtcatggaggtcctcgccgccaagactggctacgagactgacatgatcgagtccgacatggagctcgagaccgagctcggcattgactccatcaagcgtgtcgagattctctccgaggtccaggccatgctcaacgtcgaggccaaggacgtcgacgctctcagccgcacccgcactgttggcgaggtcgtcgatgccatgaaggccgagatcgctggtggctctgccccggcgcctgccgccgctgctcctgctccggctgctgccgcccctgcgcctgccgcccctgcgcctgctgtctcgagcgagcttctcgagaaggccgagactgtcgtcatggaggtcctcgccgccaagactggctacgagactgacatgatcgagtccgacatggagctcgagaccgagctcggcattgactccatcaagcgtgtcgagattctctccgaggtccaggccatgctcaacgtcgaggccaaggacgtcgacgctctcagccgcacccgcactgttggcgaggtcgtcgatgccatgaaggccgagatcgctggtggctctgccccggcgcctgccgccgctgctcctgctccggctgctgccgcccctgcgcctgccgcccctgcgcctgccgcccctgcgcctgctgtctcgagcgagcttctcgagaaggccgagactgtcgtcatggaggtcctcgccgccaagactggctacgagactgacatgattgagtccgacatggagctcgagaccgagctcggcattgactccatcaagcgtgtcgagattctctccgaggttcaggccatgctcaacgtcgaggccaaggacgtcgacgctctcagccgcactcgcactgttggtgaggtcgtcgatgccatgaaggctgagatcgctggcagctccgcctcggcgcctgccgccgctgctcctgctccggctgctgccgctcctgcgcccgctgccgccgcccctgctgtctcgaacgagcttctcgagaaagccgagactgtcgtcatggaggtcctcgccgccaagactggctacgagactgacatgatcgagtccgacatggagctcgagactgagctcggcattgactccatcaagcgtgtcgagatcctctccgaggttcaggccatgctcaacgtcgaggccaaggacgtcgatgccctcagccgcacccgcactgttggcgaggttgtcgatgccatgaaggccgagatcgctggtggctctgccccggcgcctgccgccgctgcccctgctccggctgccgccgcccctgctgtctcgaacgagcttctcgagaaggccgagactgtcgtcatggaggtcctcgccgccaagactggctacgagaccgacatgatcgagtccgacatggagctcgagaccgagctcggcattgactccatcaagcgtgtcgagattctctccgaggttcaggccatgctcaacgtcgaggccaaggacgtcgatgctctcagccgcactcgcactgttggcgaggtcgtcgatgccatgaaggctgagatcgccggcagctccgccccggcgcctgccgccgctgctcctgctccggctgctgccgctcctgcgcccgctgccgctgcccctgctgtctcgagcgagcttctcgagaaggccgagaccgtcgtcatggaggtcctcgccgccaagactggctacgagactgacatgattgagtccgacatggagctcgagactgagctcggcattgactccatcaagcgtgtcgagatcctctccgaggttcaggccatgctcaacgtcgaggccaaggacgtcgatgccctcagccgcacccgcactgttggcgaggttgtcgatgccatgaaggccgagatcgctggtggctctgccccggcgcctgccgccgctgcccctgctccggctgccgccgcccctgctgtctcgaacgagcttcttgagaaggccgagaccgtcgtcatggaggtcctcgccgccaagactggctacgagaccgacatgatcgagtccgacatggagctcgagaccgagctcggcattgactccatcaagcgtgtcgagattctctccgaggttcaggccatgctcaacgtcgaggccaaggacgtcgacgctctcagccgcactcgcactgttggcgaggtcgtcgatgccatgaaggctgagatcgctggtggctctgccccggcgcctgccgccgctgctcctgcctcggctggcgccgcgcctgcggtcaagattgactcggtccacggcgctgactgtgatgatctttccctgatgcacgccaaggtggttgacatccgccgcccggacgagctcatcctggagcgccccgagaaccgccccgttctcgttgtcgatgacggcagcgagctcaccctcgccctggtccgcgtcctcggcgcctgcgccgttgtcctgacctttgagggtctccagctcgctcagcgcgctggtgccgctgccatccgccacgtgctcgccaaggatctttccgcggagagcgccgagaaggccatcaaggaggccgagcagcgctttggcgctctcggcggcttcatctcgcagcaggcggagcgcttcgagcccgccgaaatcctcggcttcacgctcatgtgcgccaagttcgccaaggcttccctctgcacggctgtggctggcggccgcccggcctttatcggtgtggcgcgccttgacggccgcctcggattcacttcgcagggcacttctgacgcgctcaagcgtgcccagcgtggtgccatctttggcctctgcaagaccatcggcctcgagtggtccgagtctgacgtcttttcccgcggcgtggacattgctcagggcatgcaccccgaggatgccgccgtggcgattgtgcgcgagatggcgtgcgctgacattcgcattcgcgaggtcggcattggcgcaaaccagcagcgctgcacgatccgtgccgccaagctcgagaccggcaacccgcagcgccagatcgccaaggacgacgtgctgctcgtttctggcggcgctcgcggcatcacgcctctttgcatccgggagatcacgcgccagatcgcgggcggcaagtacattctgcttggccgcagcaaggtctctgcgagcgaaccggcatggtgcgctggcatcactgacgagaaggctgtgcaaaaggctgctacccaggagctcaagcgcgcctttagcgctggcgagggccccaagcccacgccccgcgctgtcactaagcttgtgggctctgttcttggcgctcgcgaggtgcgcagctctattgctgcgattgaagcgctcggcggcaaggccatctactcgtcgtgcgacgtgaactctgccgccgacgtggccaaggccgtgcgcgatgccgagtcccagctcggtgcccgcgtctcgggcatcgttcatgcctcgggcgtgctccgcgaccgtctcatcgagaagaagctccccgacgagttcgacgccgtctttggcaccaaggtcaccggtctcgagaacctcctcgccgccgtcgaccgcgccaacctcaagcacatggtcctcttcagctcgctcgccggcttccacggcaacgtcggccagtctgactacgccatggccaacgaggcccttaacaagatgggcctcgagctcgccaaggacgtctcggtcaagtcgatctgcttcggtccctgggacggtggcatggtgacgccgcagctcaagaagcagttccaggagatgggcgtgcagatcatcccccgcgagggcggcgctgataccgtggcgcgcatcgtgctcggctcctcgccggctgagatccttgtcggcaactggcgcaccccgtccaagaaggtcggctcggacaccatcaccctgcaccgcaagatttccgccaagtccaaccccttcctcgaggaccacgtcatccagggccgccgcgtgctgcccatgacgctggccattggctcgctcgcggagacctgcctcggcctcttccccggctactcgctctgggccattgacgacgcccagctcttcaagggtgtcactgtcgacggcgacgtcaactgcgaggtgaccctcaccccgtcgacggcgccctcgggccgcgtcaacgtccaggccacgctcaagaccttttccagcggcaagctggtcccggcctaccgcgccgtcatcgtgctctccaaccagggcgcgcccccggccaacgccaccatgcagccgccctcgctcgatgccgatccggcgctccagggctccgtctacgacggcaagaccctcttccacggcccggccttccgcggcatcgatgacgtgctctcgtgcaccaagagccagcttgtggccaagtgcagcgctgtccccggctccgacgccgctcgcggcgagtttgccacggacactgacgcccatgaccccttcgtgaacgacctggcctttcaggccatgctcgtctgggtgcgccgcacgctcggccaggctgcgctccccaactcgatccagcgcatcgtccagcaccgcccggtcccgcaggacaagcccttctacattaccctccgctccaaccagtcgggcggtcactcccagcacaagcacgcccttcagttccacaacgagcagggcgatctcttcattgatgtccaggcttcggtcatcgccacggacagccttgccttctaaatctaaactaggccatggtgacttaaggtagttagcttaatcacttaggtcacccagtccaagcccggcctagcacgatgatcatgagtgttgctattgatgtatgttaatactatacacagtcatcgtgtgtgttttataaaactgtaagcttaggatgtttgaggctaatgtaattagcactacaccgtaataaatgagaggtttactttatgttttaataatgttcttacccttgctgctctctaaactgtaatggcgtacggttagctaaactaaagtaaaaatcgattcgcttgagtaaaattagtgaccgggaaagatcatcgactactactgctcagagatgtaatcggtaattaagacttcaagctcaataattaattaggagtaaatctggcttcgaatttttaaattgtcaacttccaaagaaggattggcaagactcaatctcaattgcccaacaaacatatggctctttacaaatttggaatctctttttgatggcaagaacgtcgtaattcctctgtcgatctcatgtaattaccaaactcatctacttattactttctttatatgcacttactgatgcggccgcttaattaagatgagtgatactcaggactcaggactcactctgctgatcactagtgctagcctcgaggtcgacacaactttgtatacaaaagttgtctagacctagctaggctcagcaactcatccagtcaagttcgagtcagtgagttgggcggccgcagcttatagtaaagatttttttgttaataaaatgaaagttaatatttatggatttatttgaacatatttacaagtttttgttaataaatttatttacagaagtgttaaatttgaaaatgtgttaaatgagagttaatatttatggatataatattactttatttaaaaataaaatgaatttatattaaaatatgatttggtaaaagatattataaagaggaacttggatgagaaagacgacgatgggcaaaagttgcatggcacaccgcttttgttcagtaacatctgcactgtggcgcctttttcacactcaccatgcatgctgccacgtcagctttcacactatgacaccactggccatacacgttgccacctcagctttctcctcttctcactatgacacgactggccatgcatgcatgcatgctgccacctcagctcccgcctcttcacccgtgtctttctctcatgtcgcagtgctgcgtgccaacctcttctctctataaatagagagaagagaatgatggttaaactcaaaccaaaacaagaaaacatacacaaatagcaaaacggatccacaaccaaaaatggccgctcgcaacgtgtctgcagcgcatgagatgcacgatgaaaagcgcatcgccgtcgtcggcatggccgtccagtacgccggatgcaaaaccaaggacgagttctgggaggtgctcatgaacggcaaggtcgagtccaaggtgatcagcgacaaacgactcggctccaactaccgcgccgagcactacaaagcagagcgcagcaagtatgccgacaccttttgcaacgaaacgtacggcacccttgacgagaacgagatcgacaacgagcacgaactcctcctcaacctcgccaagcaggcactcgcagagacatccgtcaaagactcgacacgctgcggcatcgtcagcggctgcctctcgttccccatggacaacctccagggtgaactcctcaacgtgtaccaaaaccatgtcgagaaaaagctcggggcccgcgtcttcaaggacgcctcccattggtccgaacgcgagcagtccaacaaacccgaggccggtgaccgccgcatcttcatggacccggcctccttcgtcgccgaagaactcaacctcggcgcccttcactactccgtcgacgcagcatgcgccacggcgctctacgtgctccgcctcgcgcaggatcatctcgtctccggcgccgccgacgtcatgctctgcggtgccacctgcctgccggagccctttttcatcctttcgggcttttccaccttccaggccatgcccgtcggcacgggccagaacgtgtccatgccgctgcacaaggacagccagggcctcaccccgggtgagggcggctccatcatggtcctcaagcgtctcgatgatgccatccgcgacggcgaccacatctacggcacccttctcggcgccaatgtcagcaactccggcacaggtctgcccctcaagccccttctccccagcgagaaaaagtgcctcatggacacctacacgcgcattaacgtgcacccgcacaagattcagtacgtcgagtgccacgccaccggcacgccccagggtgatcgtgtggaaatcgacgccgtcaaggcctgctttgaaggcaaggtcccccgtttcggtaccacaaagggcaactttggacacaccctcgtcgcagccggctttgccggtatgtgcaaggtcctcctctccatgaagcatggcatcatcccgcccaccccgggtatcgatgacgagaccaagatggaccctctcgtcgtctccggtgaggccatcccatggccagagaccaacggcgagcccaagcgcgccggtctctcggcctttggctttggtggcaccaacgcccatgccgtctttgaggagcatgacccctccaacgccgcctgcacgggccacgactccatttctgcgctctcggcccgctgcggcggtgaaagcaacatgcgcatcgccatcactggtatggacgccacctttggcgctctcaagggactcgacgccttcgagcgcgccatttacaccggcgctcacggtgccatcccactcccagaaaagcgctggcgctttctcggcaaggacaaggactttcttgacctctgcggcgtcaaggccaccccgcacggctgctacattgaagatgttgaggtcgacttccagcgcctccgcacgcccatgacccctgaagacatgctcctccctcagcagcttctggccgtcaccaccattgaccgcgccatcctcgactcgggaatgaaaaagggtggcaatgtcgccgtctttgtcggcctcggcaccgacctcgagctctaccgtcaccgtgctcgcgtcgctctcaaggagcgcgtccgccctgaagcctccaagaagctcaatgacatgatgcagtacattaacgactgcggcacatccacatcgtacacctcgtacattggcaacctcgtcgccacgcgcgtctcgtcgcagtggggcttcacgggcccctcctttacgatcaccgagggcaacaactccgtctaccgctgcgccgagctcggcaagtacctcctcgagaccggcgaggtcgatggcgtcgtcgttgcgggtgtcgatctctgcggcagtgccgaaaacctttacgtcaagtctcgccgcttcaaggtgtccacctccgataccccgcgcgccagctttgacgccgccgccgatggctactttgtcggcgagggctgcggtgcctttgtgctcaagcgtgagactagctgcaccaaggacgaccgtatctacgcttgcatggatgccatcgtccctggcaacgtccctagcgcctgcttgcgcgaggccctcgaccaggcgcgcgtcaagccgggcgatatcgagatgctcgagctcagcgccgactccgcccgccacctcaaggacccgtccgtcctgcccaaggagctcactgccgaggaggaaatcggcggccttcagacgatccttcgtgacgatgacaagctcccgcgcaacgtcgcaacgggcagtgtcaaggccaccgtcggtgacaccggttatgcctctggtgctgccagcctcatcaaggctgcgctttgcatctacaaccgctacctgcccagcaacggcgacgactgggatgaacccgcccctgaggcgccctgggacagcaccctctttgcgtgccagacctcgcgcgcttggctcaagaaccctggcgagcgtcgctatgcggccgtctcgggcgtctccgagacgcgctcgtgctattccgtgctcctctccgaagccgagggccactacgagcgcgagaaccgcatctcgctcgacgaggaggcgcccaagctcattgtgcttcgcgccgactcccacgaggagatccttggtcgcctcgacaagatccgcgagcgcttcttgcagcccacgggcgccgccccgcgcgagtccgagctcaaggcgcaggcccgccgcatcttcctcgagctcctcggcgagacccttgcccaggatgccgcttcttcaggctcgcaaaagcccctcgctctcagcctcgtctccacgccctccaagctccagcgcgaggtcgagctcgcggccaagggtatcccgcgctgcctcaagatgcgccgcgattggagctcccctgctggcagccgctacgcgcctgagccgctcgccagcgaccgcgtcgccttcatgtacggcgaaggtcgcagcccttactacggcatcacccaagacattcaccgcatttggcccgaactccacgaggtcatcaacgaaaagacgaaccgtctctgggccgaaggcgaccgctgggtcatgccgcgcgccagcttcaagtcggagctcgagagccagcagcaagagtttgatcgcaacatgattgaaatgttccgtcttggaatcctcacctcaattgccttcaccaatctggcgcgcgacgttctcaacatcacgcccaaggccgcctttggcctcagtcttggcgagatttccatgatttttgccttttccaagaagaacggtctcatctccgaccagctcaccaaggatcttcgcgagtccgacgtgtggaacaaggctctggccgttgaatttaatgcgctgcgcgaggcctggggcattccacagagtgtccccaaggacgagttctggcaaggctacattgtgcgcggcaccaagcaggatatcgaggcggccatcgccccggacagcaagtacgtgcgcctcaccatcatcaatgatgccaacaccgccctcattagcggcaagcccgacgcctgcaaggctgcgatcgcgcgtctcggtggcaacattcctgcgcttcccgtgacccagggcatgtgcggccactgccccgaggtgggaccttataccaaggatatcgccaagatccatgccaaccttgagttccccgttgtcgacggccttgacctctggaccacaatcaaccagaagcgcctcgtgccacgcgccacgggcgccaaggacgaatgggccccttcttcctttggcgagtacgccggccagctctacgagaagcaggctaacttcccccaaatcgtcgagaccatttacaagcaaaactacgacgtctttgtcgaggttgggcccaacaaccaccgtagcaccgcagtgcgcaccacgcttggtccccagcgcaaccaccttgctggcgccatcgacaagcagaacgaggatgcttggacgaccatcgtcaagcttgtggcttcgctcaaggcccaccttgttcctggcgtcacgatctcgccgctgtaccactccaagcttgtggcggaggctgaggcttgctacgctgcgctctgcaagggtgaaaagcccaagaagaacaagtttgtgcgcaagattcagctcaacggtcgcttcaacagcaaggcggaccccatctcctcggccgatcttgccagctttccgcctgcggaccctgccattgaagccgccatctcgagccgcatcatgaagccggttgctccgaagttctacgcgcgtctcaacattgacgagcaggacgagacccgtgatccgatcctcaacaaggacaacgcgccgtcttccagctctagctcctcttccagctcttccagctcttccagcccgtcgccagctccgtccgccccagtgcaaaagaaggctgctccggccgcggagaccaaggctgttgcttcggctgacgcacttcgcagtgccctgctcgatctcgacagtatgcttgcgctgagctctgccagtgcctccggcaaccttgttgagactgcgcctagcgacgcctcggtcattgtgccgccctgcaacattgcggatctcggcagccgcgccttcatgaaaacgtacggtgtttcggcgcctctgtacacgggcgccatggccaagggcattgcctctgcggacctcgtcattgccgccggccgccagggcatccttgcgtcctttggcgccggcggacttcccatgcaggttgtgcgtgagtccatcgaaaagattcaggccgccctgcccaatggcccgtacgctgtcaaccttatccattctccctttgacagcaacctcgaaaagggcaatgtcgatctcttcctcgagaagggtgtcacctttgtcgaggcctcggcctttatgacgctcaccccgcaggtcgtgcggtaccgcgcggctggcctcacgcgcaacgccgacggctcggtcaacatccgcaaccgtatcattggcaaggtctcgcgcaccgagctcgccgagatgttcatgcgtcctgcgcccgagcaccttcttcagaagctcattgcttccggcgagatcaaccaggagcaggccgagctcgcccgccgtgttcccgtcgctgacgacatcgcggtcgaagctgactcgggtggccacaccgacaaccgccccatccacgtcattctgcccctcatcatcaaccttcgcgaccgccttcaccgcgagtgcggctacccggccaaccttcgcgtccgtgtgggcgccggcggtggcattgggtgcccccaggcggcgctggccaccttcaacatgggtgcctcctttattgtcaccggcaccgtgaaccaggtcgccaagcagtcgggcacgtgcgacaatgtgcgcaagcagctcgcgaaggccacttactcggacgtatgcatggccccggctgccgacatgttcgaggaaggcgtcaagcttcaggtcctcaagaagggaaccatgtttccctcgcgcgccaacaagctctacgagctcttttgcaagtacgactcgttcgagtccatgccccccgcagagcttgcgcgcgtcgagaagcgcatcttcagccgcgcgctcgaagaggtctgggacgagaccaaaaacttttacattaaccgtcttcacaacccggagaagatccagcgcgccgagcgcgaccccaagctcaagatgtcgctgtgctttcgctggtacctgagcctggcgagccgctgggccaacactggagcttccgatcgcgtcatggactaccaggtctggtgcggtcctgccattggttccttcaacgatttcatcaagggaacttaccttgatccggccgtcgcaaacgagtacccgtgcgtcgttcagattaacaagcagatccttcgtggagcgtgcttcttgcgccgtctcgaaattctgcgcaacgcacgcctttccgatggcgctgccgctcttgtggccagcatcgatgacacatacgtcccggccgagaagctgtaagcggccgcatttaaatggatccactaggccatggtgacttaaggtagttagcttaatcacttaggtcacccagtccaagcccggcctagcacgatgatcatgagtgttgctattgatgtatgttaatactatacacagtcatcgtgtgtgttttataaaactgtaagcttaggatgtttgaggctaatgtaattagcactacaccgtaataaatgagaggtttactttatgttttaataatgttcttacccttgctgctctctaaactgtaatggcgtacggttagctaaactaaagtaaaaatcgattcgcttgagtaaaattagtgaccgggaaagatcatcgactactactgctcagagatgtaatcggtaattaagacttcaagctcaataattaattaggagtaaatctggcttcgaatttttaaattgtcaacttccaaagaaggattggcaagactcaatctcaattgcccaacaaacatatggctctttacaaatttggaatctctttttgatggcaagaacgtcgtaattcctctgtcgatctcatgtaattaccaaactcatctacttattactttctttatatgcacttactgatgcggccgcttaattaatctgacctgaccactagacctgagtgagtacagatgtgctactagtgctagcctcgaggtcgaccaacttttctatacaaagttgtctagacctagctaggactaggcactgagtgactcactgacctgactgagtgactggcggccgcagcttatagtaaagatttttttgttaataaaatgaaagttaatatttatggatttatttgaacatatttacaagtttttgttaataaatttatttacagaagtgttaaatttgaaaatgtgttaaatgagagttaatatttatggatataatattactttatttaaaaataaaatgaatttatattaaaatatgatttggtaaaagatattataaagaggaacttggatgagaaagacgacgatgggcaaaagttgcatggcacaccgcttttgttcagtaacatctgcactgtggcgcctttttcacactcaccatgcatgctgccacgtcagctttcacactatgacaccactggccatacacgttgccacctcagctttctcctcttctcactatgacacgactggccatgcatgcatgcatgctgccacctcagctcccgcctcttcacccgtgtctttctctcatgtcgcagtgctgcgtgccaacctcttctctctataaatagagagaagagaatgatggttaaactcaaaccaaaacaagaaaacatacacaaatagcaaaacggatccacaaccaaaacatatggcgctccgtgtcaagacgaacaagaagccatgctgggagatgaccaaggaggagctgaccagcggcaagaccgaggtgttcaactatgaggaactcctcgagttcgcagagggcgacatcgccaaggtcttcggacccgagttcgccgtcatcgacaagtacccgcgccgcgtgcgcctgcccgcccgcgagtacctgctcgtgacccgcgtcaccctcatggacgccgaggtcaacaactaccgcgtcggcgcccgcatggtcaccgagtacgatctccccgtcaacggagagctctccgagggcggagactgcccctgggccgtcctggtcgagagtggccagtgcgatctcatgctcatctcctacatgggcattgacttccagaaccagggcgaccgcgtctaccgcctgctcaacaccacgctcaccttttacggcgtggcccacgagggcgagaccctcgagtacgacattcgcgtcaccggcttcgccaagcgtctcgacggcggcatctccatgttcttcttcgagtacgactgctacgtcaacggccgcctcctcatcgagatgcgcgatggctgcgccggcttcttcaccaacgaggagctcgacgccggcaagggcgtcgtcttcacccgcggcgacctcgccgcccgcgccaagatcccaaagcaggacgtctccccctacgccgtcgccccctgcctccacaagaccaagctcaacgaaaaggagatgcagaccctcgtcgacaaggactgggcatccgtctttggctccaagaacggcatgccggaaatcaactacaaactctgcgcgcgtaagatgctcatgattgaccgcgtcaccagcattgaccacaagggcggtgtctacggcctcggtcagctcgtcggtgaaaagatcctcgagcgcgaccactggtactttccctgccactttgtcaaggatcaggtcatggccggatccctcgtctccgacggctgcagccagatgctcaagatgtacatgatctggctcggcctccacctcaccaccggaccctttgacttccgcccggtcaacggccaccccaacaaggtccgctgccgcggccaaatctccccgcacaagggcaagctcgtctacgtcatggagatcaaggagatgggcttcgacgaggacaacgacccgtacgccattgccgacgtcaacatcattgatgtcgacttcgaaaagggccaggactttagcctcgaccgcatcagcgactacggcaagggcgacctcaacaagaagatcgtcgtcgactttaagggcatcgctctcaagatgcagaagcgctccaccaacaagaacccctccaaggttcagcccgtctttgccaacggcgccgccactgtcggccccgaggcctccaaggcttcctccggcgccagcgccagcgccagcgccgccccggccaagcctgccttcagcgccgatgttcttgcgcccaagcccgttgcccttcccgagcacatcctcaagggcgacgccctcgcccccaaggagatgtcctggcaccccatggcccgcatcccgggcaacccgacgccctcttttgcgccctcggcctacaagccgcgcaacatcgcctttacgcccttccccggcaaccccaacgataacgaccacaccccgggcaagatgccgctcacctggttcaacatggccgagttcatggccggcaaggtcagcatgtgcctcggccccgagttcgccaagttcgacgactcgaacaccagccgcagccccgcttgggacctcgctctcgtcacccgcgccgtgtctgtgtctgacctcaagcacgtcaactaccgcaacatcgacctcgacccctccaagggtaccatggtcggcgagttcgactgccccgcggacgcctggttctacaagggcgcctgcaacgatgcccacatgccgtactcgatcctcatggagatcgccctccagacctcgggtgtgctcacctcggtgctcaaggcgcccctgaccatggagaaggacgacatcctcttccgcaacctcgacgccaacgccgagttcgtgcgcgccgacctcgactaccgcggcaagactatccgcaacgtcaccaagtgcactggctacagcatgctcggcgagatgggcgtccaccgcttcacctttgagctctacgtcgatgatgtgctcttttacaagggctcgacctcgttcggctggttcgtgcccgaggtctttgccgcccaggccggcctcgacaacggccgcaagtcggagccctggttcattgagaacaaggttccggcctcgcaggtctcctcctttgacgtgcgccccaacggcagcggccgcaccgccatcttcgccaacgcccccagcggcgcccagctcaaccgccgcacggaccagggccagtacctcgacgccgtcgacattgtctccggcagcggcaagaagagcctcggctacgcccacggttccaagacggtcaacccgaacgactggttcttctcgtgccacttttggtttgactcggtcatgcccggaagtctcggtgtcgagtccatgttccagctcgtcgaggccatcgccgcccacgaggatctcgctggcaagcacggcattgccaaccccacctttgtgcacgccccgggcaagatcagctggaagtaccgcggccagctcacgcccaagagcaagaagatggactcggaggtccacatcgtgtccgtggacgcccacgacggcgttgtcgacctcgtcgccgacggcttcctctgggccgacagcctccgcgtctactcggtgagcaacattcgcgtgcgcatcgcctccggtgaggcccctgccgccgcctcctccgccgcctctgtgggctcctcggcttcgtccgtcgagcgcacgcgctcgagccccgctgtcgcctccggcccggcccagaccatcgacctcaagcagctcaagaccgagctcctcgagctcgatgccccgctctacctctcgcaggacccgaccagcggccagctcaagaagcacaccgacgtggcctccggccaggccaccatcgtgcagccctgcacgctcggcgacctcggtgaccgctccttcatggagacctacggcgtcgtcgccccgctgtacacgggcgccatggccaagggcattgcctcggcggacctcgtcatcgccgccggcaagcgcaagatcctcggctcctttggcgccggcggcctccccatgcaccacgtgcgcgccgccctcgagaagatccaggccgccctgcctcagggcccctacgccgtcaacctcatccactcgccttttgacagcaacctcgagaagggcaacgtcgatctcttcctcgagaagggcgtcactgtggtggaggcctcggcattcatgaccctcaccccgcaggtcgtgcgctaccgcgccgccggcctctcgcgcaacgccgacggttcggtcaacatccgcaaccgcatcatcggcaaggtctcgcgcaccgagctcgccgagatgttcatccgcccggccccggagcacctcctcgagaagctcatcgcctcgggcgagatcacccaggagcaggccgagctcgcgcgccgcgttcccgtcgccgacgatatcgctgtcgaggctgactcgggcggccacaccgacaaccgccccatccacgtcatcctcccgctcatcatcaacctccgcaaccgcctgcaccgcgagtgcggctaccccgcgcacctccgcgtccgcgttggcgccggcggtggcgtcggctgcccgcaggccgccgccgccgcgctcaccatgggcgccgccttcatcgtcaccggcactgtcaaccaggtcgccaagcagtccggcacctgcgacaacgtgcgcaagcagctctcgcaggccacctactcggatatctgcatggccccggccgccgacatgttcgaggagggcgtcaagctccaggtcctcaagaagggaaccatgttcccctcgcgcgccaacaagctctacgagctcttttgcaagtacgactccttcgactccatgcctcctgccgagctcgagcgcatcgagaagcgtatcttcaagcgcgcactccaggaggtctgggaggagaccaaggacttttacattaacggtctcaagaacccggagaagatccagcgcgccgagcacgaccccaagctcaagatgtcgctctgcttccgctggtaccttggtcttgccagccgctgggccaacatgggcgccccggaccgcgtcatggactaccaggtctggtgtggcccggccattggcgccttcaacgacttcatcaagggcacctacctcgaccccgctgtctccaacgagtacccctgtgtcgtccagatcaacctgcaaatcctccgtggtgcctgctacctgcgccgtctcaacgccctgcgcaacgacccgcgcattgacctcgagaccgaggatgctgcctttgtctacgagcccaccaacgcgctctaagctagcatttaaatctaggccatggtgacttaaggtagttagcttaatcacttaggtcacccagtccaagcccggcctagcacgatgatcatgagtgttgctattgatgtatgttaatactatacacagtcatcgtgtgtgttttataaaactgtaagcttaggatgtttgaggctaatgtaattagcactacaccgtaataaatgagaggtttactttatgttttaataatgttcttacccttgctgctctctaaactgtaatggcgtacggttagctaaactaaagtaaaaatcgattcgcttgagtaaaattagtgaccgggaaagatcatcgactactactgctcagagatgtaatcggtaattaagacttcaagctcaataattaattaggagtaaatctggcttcgaatttttaaattgtcaacttccaaagaaggattggcaagactcaatctcaattgcccaacaaacatatatggctctttacaaatttggaatctctttttgatggcaagaacgtcgtaattcctctgtcgatctcatgtaattaccaaactcatctacttattactttctttatatgcacttactgatgcggccgcttaattaatcacgagtggatgactgtcacgactgactcatgactgactactagtgctagcctcgaggtcgacacaactttgtataataaagttgtctagacctaggagctgtgctgggtaactcacatgagtcactggtcacatcagcggccgcagcttatagtaaagatttttttgttaataaaatgaaagttaatatttatggatttatttgaacatatttacaagtttttgttaataaatttatttacagaagtgttaaatttgaaaatgtgttaaatgagagttaatatttatggatataatattactttatttaaaaataaaatgaatttatattaaaatatgatttggtaaaagatattataaagaggaacttggatgagaaagacgacgatgggcaaaagttgcatggcacaccgcttttgttcagtaacatctgcactgtggcgcctttttcacactcaccatgcatgctgccacgtcagctttcacactatgacaccactggccatacacgttgccacctcagctttctcctcttctcactatgacacgactggccatgcatgcatgcatgctgccacctcagctcccgcctcttcacccgtgtctttctctcatgtcgcagtgctgcgtgccaacctcttctctctataaatagagagaagagaatgatggttaaactcaaaccaaaacaagaaaacatacacaaatagcaaaacggatccacaaccaaaaatgttgcagcatacttggctaccaaaacccccaaatttaaccttattgtcagatgaagttcatctctggcgcattccccttgaccaaccagaatcacagctacaggatttagccgctaccttatctagtgacgaattagcccgtgcaaacagattttattttcccgaacatcgccggcgttttactgctggtcgtggtattctccgcagtatcttggggggctatttgggtgtggaaccagggcaagttaaatttgattatgaatcccgtggtaaaccaatattaggcgatcgctttgccgagagtggtttattatttaacttgtcacactcccagaacttggccttgtgtgcagtcaattacacgcgccaaatcggcatcgatttagaatatctccgccccacatctgatttagaatcccttgccaaaaggttctttttaccgcgagaatatgaattattgcgatcgctacccgatgagcaaaaacaaaaaattttctttcgttactggacttgtaaagaggcttatcttaaagcaacgggtgacggcatcgctaaattagaggaaattgaaatagcactaactcccacagaaccagctaagttacagacagctccagcgtggagtctcctagagctagtgccagatgataattgtgttgctgctgttgccgtggcgggttttggctggcagccaaaattctggcattattgagtagttagcttaatcacttaggtcacccagtccaagcccggcctagcacgatgatcatgagtgttgctattgatgtatgttaatactatacacagtcatcgtgtgtgttttataaaactgtaagcttaggatgtttgaggctaatgtaattagcactacaccgtaataaatgagaggtttactttatgttttaataatgttcttacccttgctgctctctaaactgtaatggcgtacggttagctaaactaaagtaaaaatcgattcgcttgagtaaaattagtgaccgggaaagatcatcgactactactgctcagagatgtaatcggtaattaagacttcaagctcaataattaattaggagtaaatctggcttcgaatttttaaattgtcaacttccaaagaaggattggcaagactcaatctcaattgcccaacaaacatatggctctttacaaatttggaatctctttttgatggcaagaacgtcgtaattcctctgtcgatctcatgtaattaccaaactcatctacttattactttctttatatgcacttactgatgcggccgcttaattaactactgtcactgaggccgtagacgagtacggactgatctaactagtgctagcctcgaggtcgacacccagctttc

SEQ ID NO: 35 - DNA, 35154 bp, Artificial sequence
  plasmid pDAB7369
ttgtacaaagtggttgcggccgcttaattaaatttaaattcaattaatgcaatcttgattttcaacaacgaaggtaatggcgtaaaagaaaaaatgtatgttattgtattgatctttcatgatgttgaagcgtgccataatatgatgatgtataattaaaatattaactgtcgcattttattgaaatggcactgttatttcaaccatatctttgattctgttacatgacacgactgcaagaagtaaataatagacgccgttgttaaagaattgctatcatatgtgcctaactagagggaatttgagcgtcagacctaatcaaatattacaaaatatctcactctgtcgccagcaatggtgtaatcagcgcagacaaatggcgtaaagatcgcggaaaaacctccccgagtggcatgatagctgcctctgtattgctgatttagtcagccttatttgacttaagggtgccctcgttagtgacaaattgctttcaaggagacagccatgccccacactttgttgaaaaacaaattgcctttggggagacggtaaagccagttgctcttcaataaggaatgtcgaggaggcaatgtaaccgcctctggtagtacacttctctaatccaaaaatcaatttgtattcaagataccgcaaaaaacttatggtttaaaccctgcaggactagtccagaaggtaattatccaagatgtagcatcaagaatccaatgtttacgggaaaaactatggaagtattatgtaagctcagcaagaagcagatcaatatgcggcacatatgcaacctatgttcaaaaatgaagaatgtacagatacaagatcctatactgccagaatacgaagaagaatacgtagaaattgaaaaagaagaaccaggcgaagaaaagaatcttgaagacgtaagcactgacgacaacaatgaaaagaagaagataaggtcggtgattgtgaaagagacatagaggacacatgtaaggtggaaaatgtaagggcggaaagtaaccttatcacaaaggaatcttatcccccactacttatccttttatatttttccgtgtcatttttgcccttgagttttcctatataaggaaccaagttcggcatttgtgaaaacaagaaaaaatttggtgtaagctattttctttgaagtactgaggatacaacttcagagaaatttgtaagtttgtaggtaccagatctggatcccaaaccatgtctccggagaggagaccagttgagattaggccagctacagcagctgatatggccgcggtttgtgatatcgttaaccattacattgagacgtctacagtgaactttaggacagagccacaaacaccacaagagtggattgatgatctagagaggttgcaagatagatacccttggttggttgctgaggttgagggtgttgtggctggtattgcttacgctgggccctggaaggctaggaacgcttacgattggacagttgagagtactgtttacgtgtcacataggcatcaaaggttgggcctaggatctacattgtacacacatttgcttaagtctatggaggcgcaaggttttaagtctgtggttgctgttataggccttccaaacgatccatctgttaggttgcatgaggctttgggatacacagcccggggtacattgcgcgcagctggatacaagcatggtggatggcatgatgttggtttttggcaaagggattttgagttgccagctcctccaaggccagttaggccagttacccaaatctgagtagttagcttaatcacctagagctcgatcggcggcaatagcttcttagcgccatcccgggttgatcctatctgtgttgaaatagttgcggtgggcaaggctctctttcagaaagacaggcggccaaaggaacccaaggtgaggtgggctatggctctcagttccttgtggaagcgcttggtctaaggtgcagaggtgttagcgggatgaagcaaaagtgtccgattgtaacaagatatgttgatcctacgtaaggatattaaagtatgtattcatcactaatataatcagtgtattccaatatgtactacgatttccaatgtctttattgtcgccgtatgtaatcggcgtcacaaaataatccccggtgactttcttttaatccaggatgaaataatatgttattataatttttgcgatttggtccgttataggaattgaagtgtgcttgaggtcggtcgccaccactcccatttcataattttacatgtatttgaaaaataaaaatttatggtattcaatttaaacacgtatacttgtaaagaatgatatcttgaaagaaatatagtttaaatatttattgataaaataacaagtcaggtattatagtccaagcaaaaacataaatttattgatgcaagtttaaattcagaaatatttcaataactgattatatcagctggtacattgccgtagatgaaagactgagtgcgatattatggtgtaatacataggaattcgtttaaacgatctgcgtctaattttcggtccaacttgcacaggaaagacgtcgaccgcggtagctcttgcccagcagactgggcttccagtcctttcgctcgatcgggtccaatgttgtcctcagctgtgaaccggaagcggacgaccaacagtggaagaactgaaaggaacgagccgtctataccttgatgatcggcctctggtgaagggtatcatcgcagccaagcaagctcatgaaaggctgatgggggaggtgtataattatgaggcccacggcgggcttattctttagggaggatctatctcgttgctcaagtgcatggcgcaaagcagttattggagtgcggattttcgttggcatattattcgccacgagttagcagacgaagagaccttcatgaacgtggccaaggccagagttaagcagatgttacgccctgctgcaggcctttctattatccaatagttggttgatctttggaaagagcctcggctgaggcccatactgaaagagatcgatggatatcgatatgccatgttgtttgctagccagaaccagatcacatccgatatgctattgcagcttgacgcagatatggaggataagttgattcatgggatcgctcaggagtagctcatccatgcacgccgacaagaacagaaattccgtcgagttaacgcagccgcttacgacggattcgaaggtcatccattcggaatgtattagtttgcaccagctccgcgtcacacctgtcttcatttgaataagatgttagcaattgtttttagctttgtcttgttgtggcagggcggcaagtgcttcagacatcattctgttttcaaattttatgctggagaacagcttcttaattcctttggaaataatagactgcgtcttaaaattcagatgtctggatatagatatgattgtaaaataacctatttaagtgtcatttagaacataagttttatgaatgttcttccattttcgtcatcgaacgaataagagtaaatacaccttttttaacattacaaataagttcttatacgttgtttatacaccgggaatcatttccattattttcgcgcaaaagtcacggatattcgtgaaagcgacataaactgcgaaatttgcggggagtgtcttgagtttgcctcgaggctagcgcatgcacatagacacacacatcatctcattgatgcttggtaataattgtcattagattgtttttatgcatagatgcactcgaaatcagccaattttagacaagtatcaaacggatgtgacttcagtacattaaaaacgtccgcaatgtgttattaagttgtctaagcgtcaatttgatttacaattgaatatatcctgccccagccagccaacagctcgatttacaattgaatatatcctgccggccggcccacgcgtgtcgaggaattctgatctggcccccatttggacgtgaatgtagacacgtcgaaataaagatttccgaattagaataatttgtttattgctttcgcctataaatacgacggatcgtaatttgtcgttttatcaaaatgtactttcattttataataacgctgcggacatctacatttttgaattgaaaaaaaattggtaattactctttctttttctccatattgaccatcatactcattgctgatccatgtagatttcccggacatgaagccatttacaattgaatatatcctgccgccgctgccgctttgcacccggtggagcttgcatgttggtttctacgcagaactgagccggttaggcagataatttccattgagaactgagccatgtgcaccttccccccaacacggtgagcgacggggcaacggagtgatccacatgggacttttaaacatcatccgtcggatggcgttgcgagagaagcagtcgatccgtgagatcagccgacgcaccgggcaggcgcgcaacacgatcgcaaagtatttgaacgcaggtacaatcgagccgacgttcacgcggaacgaccaagcaagcttggctgccatttttggggtgaggccgttcgcggccgaggggcgcagcccctggggggatgggaggcccgcgttagcgggccgggagggttcgagaagggggggcaccccccttcggcgtgcgcggtcacgcgcacagggcgcagccctggttaaaaacaaggtttataaatattggtttaaaagcaggttaaaagacaggttagcggtggccgaaaaacgggcggaaacccttgcaaatgctggattttctgcctgtggacagcccctcaaatgtcaataggtgcgcccctcatctgtcagcactctgcccctcaagtgtcaaggatcgcgcccctcatctgtcagtagtcgcgcccctcaagtgtcaataccgcagggcacttatccccaggcttgtccacatcatctgtgggaaactcgcgtaaaatcaggcgttttcgccgatttgcgaggctggccagctccacgtcgccggccgaaatcgagcctgcccctcatctgtcaacgccgcgccgggtgagtcggcccctcaagtgtcaacgtccgcccctcatctgtcagtgagggccaagttttccgcgaggtatccacaacgccggcggccgcggtgtctcgcacacggcttcgacggcgtttctggcgcgtttgcagggccatagacggccgccagcccagcggcgagggcaaccagcccggtgagcgtcggaaagggtcgacggatcttttccgctgcataaccctgcttcggggtcattatagcgattttttcggtatatccatcctttttcgcacgatatacaggattttgccaaagggttcgtgtagactttccttggtgtatccaacggcgtcagccgggcaggataggtgaagtaggcccacccgcgagcgggtgttccttcttcactgtcccttattcgcacctggcggtgctcaacgggaatcctgctctgcgaggctggccggctaccgccggcgtaacagatgagggcaagcggatggctgatgaaaccaagccaaccaggaagggcagcccacctatcaaggtgtactgccttccagacgaacgaagagcgattgaggaaaaggcggcggcggccggcatgagcctgtcggcctacctgctggccgtcggccagggctacaaaatcacgggcgtcgtggactatgagcacgtccgcgagctggcccgcatcaatggcgacctgggccgcctgggcggcctgctgaaactctggctcaccgacgacccgcgcacggcgcggttcggtgatgccacgatcctcgccctgctggcgaagatcgaagagaagcaggacgagcttggcaaggtcatgatgggcgtggtccgcccgagggcagagccatgacttttttagccgctaaaacggccggggggtgcgcgtgattgccaagcacgtccccatgcgctccatcaagaagagcgacttcgcggagctggtattcgtgcagggcaagattcggaataccaagtacgagaaggacggccagacggtctacgggaccgacttcattgccgataaggtggattatctggacaccaaggcaccaggcgggtcaaatcaggaataagggcacattgccccggcgtgagtcggggcaatcccgcaaggagggtgaatgaatcggacgtttgaccggaaggcatacaggcaagaactgatcgacgcggggttttccgccgaggatgccgaaaccatcgcaagccgcaccgtcatgcgtgcgccccgcgaaaccttccagtccgtcggctcgatggtccagcaagctacggccaagatcgagcgcgacagcgtgcaactggctccccctgccctgcccgcgccatcggccgccgtggagcgttcgcgtcgtctcgaacaggaggcggcaggtttggcgaagtcgatgaccatcgacacgcgaggaactatgacgaccaagaagcgaaaaaccgccggcgaggacctggcaaaacaggtcagcgaggccaagcaggccgcgttgctgaaacacacgaagcagcagatcaaggaaatgcagctttccttgttcgatattgcgccgtggccggacacgatgcgagcgatgccaaacgacacggcccgctctgccctgttcaccacgcgcaacaagaaaatcccgcgcgaggcgctgcaaaacaaggtcattttccacgtcaacaaggacgtgaagatcacctacaccggcgtcgagctgcgggccgacgatgacgaactggtgtggcagcaggtgttggagtacgcgaagcgcacccctatcggcgagccgatcaccttcacgttctacgagctttgccaggacctgggctggtcgatcaatggccggtattacacgaaggccgaggaatgcctgtcgcgcctacaggcgacggcgatgggcttcacgtccgaccgcgttgggcacctggaatcggtgtcgctgctgcaccgcttccgcgtcctggaccgtggcaagaaaacgtcccgttgccaggtcctgatcgacgaggaaatcgtcgtgctgtttgctggcgaccactacacgaaattcatatgggagaagtaccgcaagctgtcgccgacggcccgacggatgttcgactatttcagctcgcaccgggagccgtacccgctcaagctggaaaccttccgcctcatgtgcggatcggattccacccgcgtgaagaagtggcgcgagcaggtcggcgaagcctgcgaagagttgcgaggcagcggcctggtggaacacgcctgggtcaatgatgacctggtgcattgcaaacgctagggccttgtggggtcagttccggctgggggttcagcagccagcgctttactggcatttcaggaacaagcgggcactgctcgacgcacttgcttcgctcagtatcgctcgggacgcacggcgcgctctacgaactgccgataaacagaggattaaaattgacaattgtgattaaggctcagattcgacggcttggagcggccgacgtgcaggatttccgcgagatccgattgtcggccctgaagaaagctccagagatgttcgggtccgtttacgagcacgaggagaaaaagcccatggaggcgttcgctgaacggttgcgagatgccgtggcattcggcgcctacatcgacggcgagatcattgggctgtcggtcttcaaacaggaggacggccccaaggacgctcacaaggcgcatctgtccggcgttttcgtggagcccgaacagcgaggccgaggggtcgccggtatgctgctgcgggcgttgccggcgggtttattgctcgtgatgatcgtccgacagattccaacgggaatctggtggatgcgcatcttcatcctcggcgcacttaatatttcgctattctggagcttgttgtttatttcggtctaccgcctgccgggcggggtcgcggcgacggtaggcgctgtgcagccgctgatggtcgtgttcatctctgccgctctgctaggtagcccgatacgattgatggcggtcctgggggctatttgcggaactgcgggcgtggcgctgttggtgttgacaccaaacgcagcgctagatcctgtcggcgtcgcagcgggcctggcgggggcggtttccatggcgttcggaaccgtgctgacccgcaagtggcaacctcccgtgcctctgctcacctttaccgcctggcaactggcggccggaggacttctgctcgttccagtagctttagtgtttgatccgccaatcccgatgcctacaggaaccaatgttctcggcctggcgtggctcggcctgatcggagcgggtttaacctacttcctttggttccgggggatctcgcgactcgaacctacagttgtttccttactgggctttctcagcccccgagcgcttagtgggaatttgtaccccttatcgaaccgggagcacaggatgacgcctaacaattcattcaagccgacaccgcttcgcggcgcggcttaattcaggagttaaacatcatgagggaagcggtgatcgccgaagtatcgactcaactatcagaggtagttggcgtcatcgagcgccatctcgaaccgacgttgctggccgtacatttgtacggctccgcagtggatggcggcctgaagccacacagtgatattgatttgctggttacggtgaccgtaaggcttgatgaaacaacgcggcgagctttgatcaacgaccttttggaaacttcggcttcccctggagagagcgagattctccgcgctgtagaagtcaccattgttgtgcacgacgacatcattccgtggcgttatccagctaagcgcgaactgcaatttggagaatggcagcgcaatgacattcttgcaggtatcttcgagccagccacgatcgacattgatctggctatcttgctgacaaaagcaagagaacatagcgttgccttggtaggtccagcggcggaggaactctttgatccggttcctgaacaggatctatttgaggcgctaaatgaaaccttaacgctatggaactcgccgcccgactgggctggcgatgagcgaaatgtagtgcttacgttgtcccgcatttggtacagcgcagtaaccggcaaaatcgcgccgaaggatgtcgctgccgactgggcaatggagcgcctgccggcccagtatcagcccgtcatacttgaagctaggcaggcttatcttggacaagaagatcgcttggcctcgcgcgcagatcagttggaagaatttgttcactacgtgaaaggcgagatcaccaaggtagtcggcaaataatgtctaacaattcgttcaagccgacgccgcttcgcggcgcggcttaactcaagcgttagagagctggggaagactatgcgcgatctgttgaaggtggttctaagcctcgtcttgcgatggcatttcgatccattcccattccgcgctcaagatggcttcccctcggcagttcatcagggctaaatcaatctagccgacttgtccggtgaaatgggctgcactccaacagaaacaatcaaacaaacatacacagcgacttattcacacgagctcaaattacaacggtatatatcctgccagtcagcatcatcacaccaaaagttaggcccgaatagtttgaaattagaaagctcgcaattgaggtctacaggccaaattcgctcttagccgtacaatattactcaccggatcctaaccggtttaattaaggcgcgccatgcccgggcaagcggccgcacaagtttgtacaaaaaagcaggcttctagacctaggtggagtcatcacgcagactatctcagcatgtgcgtagcacgcggccgcagcttatagtaaagatttttttgttaataaaatgaaagttaatatttatggatttatttgaacatatttacaagtttttgttaataaatttatttacagaagtgttaaatttgaaaatgtgttaaatgagagttaatatttatggatataatattactttatttaaaaataaaatgaatttatattaaaatatgatttggtaaaagatattataaagaggaacttggatgagaaagacgacgatgggcaaaagttgcatggcacaccgcttttgttcagtaacatctgcactgtggcgcctttttcacactcaccatgcatgctgccacgtcagctttcacactatgacaccactggccatacacgttgccacctcagctttctcctcttctcactatgacacgactggccatgcatgcatgcatgctgccacctcagctcccgcctcttcacccgtgtctttctctcatgtcgcagtgctgcgtgccaacctcttctctctataaatagagagaagagaatgatggttaaactcaaaccaaaacaagaaaacatacacaaatagcaaaacggatccacaaccaaaaatggcagcgaggctgcaagagcagaaaggaggtgagatggacacgaggattgcgatcataggcatgagcgccatacttccttgtggaaccacggtgagagagtcatgggagaccataagggctggcattgattgcctgtctgatcttcctgaggatcgtgttgatgtgactgcgtactttgacccagtcaagaccacaaaggacaaaatctactgcaagagaggaggtttcattcctgagtatgactttgatgcgcgtgagtttggtctcaacatgttccagatggaagattctgatgcgaatcagaccatctcacttctcaaggtcaaagaagcacttcaagatgctgggattgatgcacttggaaaggagaagaaaaacataggatgcgtgcttggcattggaggtggacagaagagttcacatgagttctacagcagactcaactatgtggttgtggagaaagtcttgagaaagatggggatgccagaggaagatgtcaaagtggctgtggagaagtacaaagcgaacttcccagaatggagacttgactctttccctggattccttgggaatgtcactgctggcagatgcaccaacacattcaacttggatggcatgaactgcgttgtggatgctgcatgtgcaagctccttgatagcagtcaaggttgcgattgatgaactgctctatggtgactgcgacatgatggtcactggtgcaacctgcacagacaactccattgggatgtacatggctttctcaaagacacctgtgttcagcacggacccaagtgtgagagcgtatgatgagaaaacgaaagggatgctcattggtgagggatcagccatgttggtgctcaaacgttatgcagatgcagtgagggatggtgatgagattcatgctgtgattcgtggttgtgcaagctcaagtgatggcaaagcagctggcatctacactcccacaatcagtggtcaagaggaagccttgagacgtgcatacaatcgtgcctgcgttgaccctgccactgtcactttggttgagggtcatgggactggcactccagttggagataggattgagttgactgcgttgaggaacttgtttgacaaagcgtatggtgaagggaacacagagaaagttgcagttggaagtatcaagtccagtattggtcatttgaaggctgttgctggtcttgctggaatgatcaaggtcatcatggctctcaaacacaagactttgcctggaacgatcaatgtggacaatccacccaatctctatgacaacactcccatcaatgagtcatccctctacatcaacacgatgaacagaccctggttccctccacctggtgttccgagacgtgctggaatatccagctttggctttggaggtgccaactaccatgcagtgttggaagaggctgaaccagagcacacgacagcgtacagactcaacaaacgtccacaaccggtgttgatgatggctgcaactcctgctgcgttgcagagcctttgtgaagctcagctgaaagagtttgaagctgcgatcaaggagaatgagacagtcaagaatactgcctacatcaagtgtgtcaagtttggagaacagttcaagttccctgggagcatacctgcgaccaatgcgagactgggattcttggtcaaagatgcggaggatgcgtgctccacgcttcgtgctatatgtgctcagtttgccaaagatgtgaccaaagaagcgtggaggcttccgagagaaggagtttctttccgtgccaaaggcattgccaccaatggtgctgttgctgcactcttctctggacaaggtgctcagtacacacacatgttcagtgaagttgcgatgaactggcctcagttcagacagtccattgctgcaatggacgctgcacagtccaaggttgctggaagtgacaaagactttgaaagagtctctcaagtcctgtacccaaggaaaccgtacgaacgtgagccagaacaagatcacaagaaaatctcactcacagcatacagccagccgtcaaccctggcatgtgctcttggtgcctttgagattttcaaggaagctggattcactccagactttgcagctggacacagcttgggtgagtttgctgcgctctatgcagctggttgtgttgacagagatgagttgtttgaacttgtttgcagaagggcaaggatcatgggaggcaaagatgcacctgccacacccaaaggttgcatggcagctgtcataggacccaacgcagagaacatcaaggttcaagctgccaacgtctggcttggaaactcaaactctccgtctcagactgtcattactgggtctgttgaagggattcaagctgaaagtgccagattgcagaaggaagggttcagagttgtgcctcttgcttgtgagtctgccttccattctccacagatggaaaatgccagctcagctttcaaagatgtcatatccaaggtttccttccgtacacccaaagcagaaacaaagctcttcagcaatgtttctggagagacctatccgacggatgccagagagatgctcactcaacacatgacctcatctgtgaagttcctgacccaagtgaggaacatgcaccaagctggtgcgagaatctttgttgagtttggaccgaaacaagttctcagcaaacttgtttctgaaaccctcaaagatgacccgtctgttgtcacagtgtctgtgaacccagcttctggcacggactctgacatacagttgagggatgctgcagttcagctggttgtggctggtgtcaatcttcaagggtttgacaagtgggatgctcctgatgccacgaggatgcaagccatcaagaaaaagagaaccacactcagactttcagctgccacctatgtcagtgacaagaccaagaaagtgagggatgctgccatgaacgacggaagatgtgtcacatacctcaagggtgctgcaccactcatcaaggctcctgaacctgtggttgacgaagctgccaagagggaggctgaaaggcttcagaaggagcttcaagacgctcagaggcagcttgacgacgccaaacgtgcagctgcagaagccaactccaaacttgctgctgccaaggaggaagccaagactgctgcagcttcagccaagcctgcagttgacactgctgttgtggagaaacatcgtgccatcctcaagtccatgctggctgagctggatggttatggaagtgttgatgcttcttcccttcagcaacagcaacagcaacagactgctccggcgcctgttaaagccgctgcccctgccgctcccgttgcaagtgctcctgctcccgccgtgtccaacgagttgcttgagaaagctgagacagttgtgatggaggttctcgctgccaagactggatacgaaacagacatgattgaggcggacatggagcttgagactgagttgggaattgacagcatcaagagggttgaaattctttctgaagtccaagctatgcttaacgttgaggcgaaagatgttgatgctctctctaggacgagaacagtgggtgaagttgtcaacgctatgaaggcagaaatcgctggttcttccgctccggcgccggcagctgccgcacctgcaccggctaaagcggctccagctgcagctgcaccagctgtttctaatgagctgctcgaaaaggcagaaactgttgtgatggaagtccttgctgccaaaactggctacgaaactgacatgatagaatcagacatggagcttgagacggagcttggaattgattccatcaagcgtgtggaaatcctcagtgaagtccaagccatgctcaatgtggaagctaaggatgtggatgctctctcaaggaccagaactgtcggtgaggttgtcaatgccatgaaggctgagatagctggaggctccgctcctgcgccggccgctgccgctcctggtcccgctgccgcggctccagctccagctgcagccgctccggccgtctcaaacgaactccttgaaaaagctgagaccgtcgtgatggaggtcttggcagctaaaaccggctatgagactgacatgattgagtctgacatggaattggagacagaacttgggatagacagcatcaaacgtgttgaaatcctcagtgaggtccaagctatgctgaacgtggaagcgaaggatgttgatgctctgtccagaacgaggaccgttggtgaggttgtggatgccatgaaggctgaaattgctggagggtctgcgcccgcgccagctgcagccgctcctgcacccgcagccgcggcacctgctccagctgcacctgcacctgccgtttcttcagaactcttggagaaggctgagacggttgtgatggaggttttggctgcaaagactggctatgagaccgacatgattgaatctgatatggaattggagacagagcttgggatcgattccatcaaaagagtggagatcctgagtgaagtccaagccatgctcaatgttgaagctaaggatgttgatgcactttcaagaacaaggacagtgggtgaggttgtggatgccatgaaggcggagattgctggagggagcgcgcctgcgccagctgccgcggcacctgcaccggcagccgcagctccagctccagctgcaccagcaccggccgcgcccgcgccagctgtttcatccgaactcctggaaaaggccgagacggttgtgatggaggtgctcgcagctaagactggttacgagaccgacatgattgaaagtgacatggagcttgaaaccgagttgggaatagatagcatcaaacgtgttgaaatcttgtctgaggtccaagctatgttgaacgtggaggcaaaagatgtcgatgcgctttcaagaaccagaacagtcggtgaggtcgtggacgccatgaaggctgaaattgccggaagctctgctagtgcgccagctgcagccgcacctgcacctgctgccgcggcacctgctccagctgcagccgctcctgccgtcagcaatgagttgctggagaaagccgaaacagttgtgatggaagtccttgctgcaaaaactggttacgaaacggacatgattgagtcagacatggaattggagaccgaacttggaatagattccatcaagagagtggagatcctctctgaggtgcaagccatgctcaacgttgaggctaaagatgttgatgcactcagtaggacaagaactgtgggggaagttgtcgatgcgatgaaggctgagattgctggaggctctgctcctgcgccggcagctgccgcacctgcacccgcagccgcggcaccagctgtcagcaacgaattgcttgagaaggctgaaacagttgtcatggaagtgctggctgcaaaaaccggctatgagactgacatgattgagtctgacatggaacttgagacggaattgggcattgacagcatcaagcgtgttgagatcctcagtgaagtccaagcaatgctcaatgtggaggctaaggatgtggatgccctctcaaggaccagaacagttggtgaggtcgttgatgcgatgaaggcggagatcgctggaagttccgcgcctgcgccagctgcagccgctcctgcacccgcagccgcggcaccggctccagctgcagccgcaccggccgtctcctcagaactcctggaaaaggctgagacagttgtgatggaagtccttgctgcgaaaactggctatgagaccgacatgattgaatctgacatggaactggagaccgagcttggaattgactccatcaaacgtgttgaaatcctctctgaggttcaagcgatgttgaatgtggaggccaaagatgttgatgctctttccagaacaaggacggtgggagaggtggttgatgccatgaaggctgagatagctgggggttctgctcctgcgccagctgcagccgctcctgctcccgctgccgcggcaccagctgtcagcaacgaactccttgaaaaagctgaaactgttgtgatggaggttttggctgcaaagactggatacgagactgacatgatagagtcagacatggagttggaaacagagcttgggattgatagcatcaagcgtgtggaaatcctttctgaggttcaagccatgctgaacgttgaggccaaagatgtcgatgctttgtcaaggaccagaacggttggagaagtggtcgatgccatgaaggctgagatagctggtggatcagcccctgctccggctgcagccgctcctgcaagtgccggtgctgcaccagctgtgaagattgattcagttcatggtgctgactgtgacgatttgtcactgatgcacgcaaaggtggttgacatcagaaggccagatgaactgattctggaaagaccggagaaccgtccagttcttgtcgttgacgatggctcagagttgacacttgctcttgtgagggtgttgggagcctgtgcagttgtcttgacctttgagggattgcagttggctcagagagctggtgcagctgccattcgtcatgttctggctaaggacctttcagcagaatcagctgagaaggccatcaaagaggctgagcaaagatttggagcgttgggaggcttcataagccagcaagcagaaaggtttgaaccagctgagatactgggtttcacactcatgtgtgcgaagtttgccaaagcctctctctgcactgctgtggctggaggtcgtcctgccttcatcggtgtggctaggcttgacggcagacttggattcacctctcaaggcacttctgacgcactcaagagagcacagcgtggagcgatctttggactctgcaagacaatagggttggagtggtcagaatctgatgtgttcagccgtggtgtggacattgctcaagggatgcacccagaagatgctgcagttgccatagttagggagatggcgtgtgctgacatcagaatcagagaggttgggattggagcaaaccagcaaagatgcacaatcagagctgccaagttggagactgggaaccctcagagacagatagcgaaagacgatgtgcttctggtttctggaggtgctcgtgggatcacacctctttgcatccgtgagatcacgcgtcagattgctggaggcaagtacattctgttgggtcgtagcaaagtttctgcgtctgaaccagcatggtgtgctggcatcactgatgagaaggctgtgcagaaagctgccacccaagagttgaagagggccttcagtgctggtgaaggacccaaacccactccaagggctgtcacgaaacttgtgggatctgttcttggtgctcgtgaagtgagaagctccattgctgccattgaagctctgggtggcaaagcgatctacagctcttgtgatgtgaactctgctgcagatgttgccaaagcagttagggatgcagagtcccagcttggtgccagagttagtggaatcgttcacgcttctggtgtgctccgtgatcgtctcatagagaagaaactccctgacgagtttgatgctgtctttgggaccaaagtcactgggttggagaatcttctggctgcagttgatcgtgccaacctcaaacacatggttctcttcagctcccttgctggtttccacggcaatgttggtcagtctgactatgcgatggcaaacgaagctctcaacaagatgggtttggaacttgcgaaggatgtcagtgtcaagtccatctgctttggtccctgggatggtgggatggtgacacctcaactcaagaaacagtttcaagaaatgggagttcagatcattcctcgtgaaggaggtgctgatacagttgcgaggattgtgttgggatcaagtcctgctgagatccttgttggaaactggaggacaccatccaagaaagttggaagtgacacgatcaccctgcatagaaagatcagtgccaagtccaatcccttcttggaggatcatgtcatacaaggcagaagggtgttgccaatgacccttgctattgggagccttgctgagacctgccttggactcttccctggctactctctctgggccatagatgacgcacagctcttcaaaggtgtcactgttgatggagacgtcaactgtgaagtgaccctcacaccgtccactgctccgagtgggagggtgaatgtccaagcgacgctcaagacgttctcaagtggaaaacttgttccagcctacagagctgtcatagtgttgtccaaccaaggtgctccacctgccaatgcaaccatgcagcctccgagccttgatgcagatcctgctttgcaagggtcagtctatgatggcaagactctctttcatggtcctgcgttcagaggcattgatgacgttctcagctgcaccaagagccagcttgttgccaagtgttctgctgttcctggatcagatgcagccagaggagagtttgcaactgacactgatgcacatgatccctttgtcaatgatcttgcctttcaagcaatgttggtctgggtgaggagaacgctgggacaagctgcactcccgaactccattcagaggatagtccaacacagaccggtcccacaagacaaacccttctacatcaccctcagatccaatcagagtggtggacatagccagcacaaacatgcacttcagttccacaacgaacaaggtgatctcttcattgatgttcaagcctctgtcattgcgacagactcacttgcgttctgagtagttagcttaatcacttaggtcacccagtccaagcccggcctagcacgatgatcatgagtgttgctattgatgtatgttaatactatacacagtcatcgtgtgtgttttataaaactgtaagcttaggatgtttgaggctaatgtaattagcactacaccgtaataaatgagaggtttactttatgttttaataatgttcttacccttgctgctctctaaactgtaatggcgtacggttagctaaactaaagtaaaaatcgattcgcttgagtaaaattagtgaccgggaaagatcatcgactactactgctcagagatgtaatcggtaattaagacttcaagctcaataattaattaggagtaaatctggcttcgaatttttaaattgtcaacttccaaagaaggattggcaagactcaatctcaattgcccaacaaacatatggctctttacaaatttggaatctctttttgatggcaagaacgtcgtaattcctctgtcgatctcatgtaattaccaaactcatctacttattactttctttatatgcacttactgatgcggccgcttaattaagatgagtgatactcaggactcaggactcactctgctgatcactagtgctagcctcgaggtcgacacaactttgtatacaaaagttgtctagacctaggctcagcaactcatccagtcaagttcgagtcagtgagttgggcggccgcagcttatagtaaagatttttttgttaataaaatgaaagttaatatttatggatttatttgaacatatttacaagtttttgttaataaatttatttacagaagtgttaaatttgaaaatgtgttaaatgagagttaatatttatggatataatattactttatttaaaaataaaatgaatttatattaaaatatgatttggtaaaagatattataaagaggaacttggatgagaaagacgacgatgggcaaaagttgcatggcacaccgcttttgttcagtaacatctgcactgtggcgcctttttcacactcaccatgcatgctgccacgtcagctttcacactatgacaccactggccatacacgttgccacctcagctttctcctcttctcactatgacacgactggccatgcatgcatgcatgctgccacctcagctcccgcctcttcacccgtgtctttctctcatgtcgcagtgctgcgtgccaacctcttctctctataaatagagagaagagaatgatggttaaactcaaaccaaaacaagaaaacatacacaaatagcaaaacggatccacaaccaaaaatggctgcaaggaacgtgagtgcggctcatgagatgcatgacgagaagaggatagctgttgtgggcatggctgttcagtatgctggatgcaaaacgaaagacgagttctgggaagttctcatgaatggaaaagttgagagcaaagtgatcagcgacaaacgtcttggttcaaattaccgtgctgaacactacaaagctgaaaggagcaagtatgctgacaccttctgcaatgagacatatggaactcttgatgagaacgaaatagacaatgagcatgaactccttttgaaccttgccaaacaagccttggctgaaacatctgtcaaagattcaacaagatgtggcatagtttctggatgcctcagcttcccgatggacaacctccaaggtgaactcttgaatgtgtaccagaaccatgttgagaagaaacttggtgccagagttttcaaagatgcctctcactggtcagaaagagaacagtccaacaaaccagaggctggtgacagaagaatcttcatggaccctgcttcctttgttgctgaggaactcaatcttggcgctctccactactctgttgatgctgcctgtgccactgcgctctatgtgctcagactggcgcaagatcacttggtctctggtgcagctgatgtgatgctttgtggtgcaacatgcctgccggagccgtttttcatactctctgggttctcaaccttccaagccatgcctgttggaacgggtcagaatgtgtccatgccgctgcacaaagattctcaaggattgacccctggtgaaggaggttccatcatggtcctcaaacgtttggatgacgcaatcagagatggagatcacatctatggaacacttttgggagccaatgtcagcaacagtggcactggtctgccacttaaaccccttttgccgtcagagaaaaagtgcctcatggacacctacacacgtatcaatgtgcatccccacaagattcagtatgttgaatgccatgcaactgggactccacaaggtgatcgtgtggaaattgatgctgtgaaggcttgctttgaaggcaaagtcccacgttttggaaccacaaaagggaactttggacacacattggtggcagctgggtttgctggcatgtgcaaagtgcttctctccatgaagcacgggatcattccacccactccgggaatagatgacgaaacgaagatggaccctctggttgtctctggtgaggccattccctggccagaaacgaatggagaaccgaagcgtgctggtctctcagcgtttggatttggtgggaccaatgctcatgctgtctttgaggaacatgacccaagcaatgctgcatgcactggccatgactccatttctgctctctctgcacgttgtggtggtgagtcaaacatgagaatagcaatcactgggatggatgccacttttggtgctttgaaaggattggatgcttttgaaagggccatctacactggtgctcatggtgctataccactcccagaaaagagatggagattcctggggaaagacaaggacttccttgatctttgtggagtcaaagcaacaccgcatggctgttacattgaagatgttgaagttgatttccagaggctgaggactccaatgactcctgaagatatgctcttgcctcaacagcttctggctgtcaccacaattgatagggccatattggactctggcatgaagaaaggtggaaatgtggctgtctttgtggggttggggaccgatcttgaactctaccgtcaccgtgcaagggttgctctcaaggagagagtgaggcctgaagccagcaagaaactcaatgacatgatgcagtacatcaatgattgtgggacaagcacttcttacaccagctacataggcaacttggttgcaacaagggtcagttcacaatggggcttcacgggaccttccttcacaatcacagaaggcaacaattctgtgtacagatgtgctgaacttggcaaatacctcttggaaacgggagaggttgatggggttgtggttgcgggtgttgatctctgtgggagtgctgagaacctttacgtcaagtcaaggcgtttcaaggtgtctacatctgacaccccgagagccagctttgatgcagctgctgatggttactttgttggagagggctgtggtgcatttgtgctcaagcgtgagacaagctgcaccaaggatgacagaatctatgcttgcatggatgccatagttcctggaaatgttccatctgcatgtttgagagaggcattggatcaagccagagtcaagcctggagacatcgagatgttggagctttctgctgattcagcgaggcatttgaaggacccgtctgttctcccaaaggaactcactgctgaggaagagattggcggacttcagacgattcttcgtgacgatgacaagctcccaaggaatgttgcaactggaagtgtcaaggccactgttggtgacactggttatgcttctggtgctgccagtttgattaaggctgcgctttgcatctacaaccgttacctgcccagcaatggagatgactgggatgaacctgcacctgaagcaccctgggacagcacactctttgcgtgccagacctcaagagcttggttgaagaaccctggtgagagacgttatgcggctgtttccggagtcagtgaaaccagaagttgctacagtgtgctgctttctgaagcagagggacactacgagagagagaacagaatcagtttggatgaggaagcacccaagctcattgtgttgagagcagactcccatgaagagattcttggaagattggacaagataagggaaaggttcttgcagcccacgggtgctgcacccagagagtctgaattgaaggcgcaagcccgtaggatctttcttgaactccttggtgagacccttgcccaagatgcagcttcatctggaagtcagaagccccttgctctcagcttggtctccactccatccaagctccagagagaggtggaacttgcggcaaaaggcattccgagatgtctcaagatgagacgtgattggagttcccctgctggaagcagatatgcgcctgagcctttggccagtgacagagttgccttcatgtatggagaaggaaggagcccttactatggcatcacacaagacattcataggatttggcctgaacttcatgaggtcatcaatgagaaaacaaaccgtctctgggctgaaggtgacagatgggtcatgccaagggccagcttcaagagtgagcttgagtcacaacagcaagagtttgacagaaacatgattgaaatgttccgtcttggaatcctcacctcaattgccttcacaaacctggcgagagatgttctcaacatcacgcccaaagcagcctttggactcagtttgggagagatttccatgatctttgctttctccaagaaaaacggtttgataagcgatcagttgacaaaggatttgagagagtcagatgtctggaacaaagctctggctgttgagttcaatgcgctcagagaagcctggggcattccacagtctgtcccaaaagatgagttctggcaaggttacatagtgaggggaacgaaacaagacatagaagcagccatagcaccagactcaaagtatgtgaggttgaccatcatcaatgatgccaacactgctctcatcagtggaaagcctgatgcatgcaaagctgcgattgctcgtcttggtggcaacatccctgcgcttccagtcactcaaggcatgtgtgggcattgcccagaggtgggaccttacaccaaggacatcgcaaagatccacgccaaccttgagttccctgtggttgatggtcttgatctctggactaccataaaccagaagaggcttgtgccaagagccacgggtgccaaagatgaatgggctccttcatcctttggggagtatgctggacagctctatgagaaacaagccaacttccctcagatagttgaaaccatctacaagcagaactatgatgtgtttgttgaagttgggccaaacaatcacagaagcacagcagtgagaaccacgcttggaccacagagaaaccaccttgctggtgccatagacaagcagaacgaggatgcttggacgacaatagtcaagctcgtggcttcattgaaggctcaccttgttcctggagtgaccatcagtccgctctaccactccaagctcgttgcagaggctgaggcttgttatgctgcgctctgtaaaggtgagaaacccaagaaaaacaagtttgtgagaaagattcagttgaatggcagattcaacagcaaggcagaccccatctcctcagcagaccttgcatccttcccacctgcggaccctgcgattgaagctgccatctcttcaaggatcatgaagcctgtggctccgaaattctatgcgcgtctcaacattgatgagcaagatgagaccagagatccgatcttgaacaaggacaatgcgccttccagctccagctcttccagcagttcctcttccagcagttcatctccgtctcctgctccttcagctccagttcagaagaaagctgccccagctgcggagacaaaagctgttgccagtgctgatgcacttcgtagtgccctgcttgatcttgactccatgcttgcgctcagctctgcaagtgcttctggcaaccttgttgagactgcgccatctgatgccagtgtcattgtccctccgtgcaacattgctgatcttggcagcagagctttcatgaaaacttatggtgtttctgcgcctctgtacaccggtgcaatggccaagggaattgcctctgcggacttggtgatcgcagctggaaggcaaggaatccttgcgtcatttggtgctggaggccttccaatgcaagttgtgcgtgagtccattgaaaagattcaagctgccctgcccaatggaccatatgctgtcaacctcatccattctccttttgacagcaaccttgagaagggaaatgttgatctcttcttggaaaagggtgtcacttttgttgaggcttcagccttcatgacgttgacaccgcaagttgtcagatacagagcggctgggttgacgaggaatgcagatgggtcagtcaacataaggaacagaatcattgggaaagtctccagaactgagctggctgaaatgttcatgcgtcctgcacctgagcatcttttgcagaagctcattgcttctggggagatcaatcaagaacaagctgagttggccagacgtgttcctgtggctgatgacattgcggttgaagctgattctggtggacacactgacaaccgtccaatccatgtcattctgcctctgattatcaacctgagggataggcttcacagagagtgtggatacccagcaaacctgagggttcgtgttggtgctgggggtggcattgggtgtccccaagctgcgctggcaactttcaacatgggtgcctctttcattgtcactggaacagtgaaccaagttgccaaacaatctgggacgtgtgacaatgtgaggaaacagcttgcgaaagcaacttactcagatgtttgcatggcaccggcagctgacatgtttgaggaaggtgtgaaacttcaagttttgaagaaaggaacaatgttcccttcaagagccaacaaactctatgagttgttctgcaagtatgattcttttgagtccatgcctccagcagagcttgcgagggttgagaaaagaatcttcagtcgtgcattggaagaggtctgggatgagaccaagaacttctacatcaaccgtctccacaacccagagaagatacagagggctgagagggaccccaaactgaagatgtcactgtgtttcagatggtatctgtccctggcttcaaggtgggccaacactggagcttctgacagagtcatggactaccaagtttggtgtggtcctgccattggttcattcaatgatttcatcaaaggaacttaccttgatccggcagtggcaaatgagtacccgtgtgttgtgcagatcaacaaacagattcttagaggagcgtgcttcttgaggcgtcttgaaatactgagaaatgcaaggctttcagatggtgcagctgcacttgtggcgagcattgatgacacatatgtccctgctgagaagctgtgagtagttagcttaatcacttaggtcacccagtccaagcccggcctagcacgatgatcatgagtgttgctattgatgtatgttaatactatacacagtcatcgtgtgtgttttataaaactgtaagcttaggatgtttgaggctaatgtaattagcactacaccgtaataaatgagaggtttactttatgttttaataatgttcttacccttgctgctctctaaactgtaatggcgtacggttagctaaactaaagtaaaaatcgattcgcttgagtaaaattagtgaccgggaaagatcatcgactactactgctcagagatgtaatcggtaattaagacttcaagctcaataattaattaggagtaaatctggcttcgaatttttaaattgtcaacttccaaagaaggattggcaagactcaatctcaattgcccaacaaacatatggctctttacaaatttggaatctctttttgatggcaagaacgtcgtaattcctctgtcgatctcatgtaattaccaaactcatctacttattactttctttatatgcacttactgatgcggccgcttaattaatctgacctgaccactagacctgagtgagtacagatgtgctactagtgctagcctcgaggtcgaccaacttttctatacaaagttgtctagacctaggactaggcactgagtgactcactgacctgactgagtgactggcggccgcagcttatagtaaagatttttttgttaataaaatgaaagttaatatttatggatttatttgaacatatttacaagtttttgttaataaatttatttacagaagtgttaaatttgaaaatgtgttaaatgagagttaatatttatggatataatattactttatttaaaaataaaatgaatttatattaaaatatgatttggtaaaagatattataaagaggaacttggatgagaaagacgacgatgggcaaaagttgcatggcacaccgcttttgttcagtaacatctgcactgtggcgcctttttcacactcaccatgcatgctgccacgtcagctttcacactatgacaccactggccatacacgttgccacctcagctttctcctcttctcactatgacacgactggccatgcatgcatgcatgctgccacctcagctcccgcctcttcacccgtgtctttctctcatgtcgcagtgctgcgtgccaacctcttctctctataaatagagagaagagaatgatggttaaactcaaaccaaaacaagaaaacatacacaaatagcaaaacggatccacaaccaaaaatggcgcttcgtgtcaagaccaacaagaagccatgttgggagatgaccaaggaggaactgacctctggcaaaactgaggtgttcaactatgaggaactcctggagtttgcagagggtgacatagctaaggtttttggtccggagtttgctgtcatagacaagtaccccagaagggtgaggctgcctgctcgtgaatacctgcttgtgacaagggtcacactcatggatgccgaggtcaacaactacagagttggtgccagaatggtcactgagtatgatcttccagtgaatggcgaattgtctgagggaggtgattgtccctgggcagttctggttgagagtggacagtgcgatttgatgctgatatcatacatgggaattgatttccagaaccaaggtgacagagtttaccgtctgctcaacaccacgttgacattctatggggttgcccatgagggagagacccttgagtatgacatcagagtgaccggttttgccaaacgtttggatggtggcatctccatgttcttctttgagtatgactgctatgtcaatgggaggcttctcattgagatgagagatggctgtgctggcttcttcacaaatgaggagcttgatgcgggaaagggtgtggtgttcacaagaggggatttggctgccagagctaagattccaaagcaagatgtttctccctatgctgtcgctccctgccttcacaaaacaaaactcaacgaaaaggagatgcagaccttggttgacaaagattgggcttccgtttttggctcaaagaatggcatgccggagatcaactacaaactctgcgcacgtaagatgctcatgattgatagagtcaccagcattgaccataagggaggtgtgtacggtttgggtcagttggttggtgagaaaatcttggagagggaccattggtacttcccatgccattttgttaaggatcaagtcatggctggatctcttgtcagcgacggttgttcacaaatgctcaagatgtacatgatctggctcggtttgcaccttaccaccggaccatttgacttcagacccgtcaacggacacccgaacaaagttaggtgtaggggtcagatatctcctcataagggaaagttggtctacgtcatggagatcaaagagatgggattcgacgaggataacgatccgtacgccattgctgacgtcaacatcattgacgttgatttcgaaaagggtcaagatttcagccttgatagaatcagcgactacggaaagggggatcttaacaaaaagatcgtcgtggacttcaagggcattgctctcaagatgcagaagagatccacgaacaagaacccctccaaagttcagcccgtttttgctaacggtgcagccactgtgggaccggaagcgtccaaggccagctctggtgccagtgctagtgcttctgctgcccctgcgaagcctgctttctcagcagatgttcttgcgccaaagccagttgcacttcctgaacatatcctcaagggtgacgctctcgctccgaaagaaatgtcctggcatcccatgtcaaaacttcctggcaacccgacgccgttcttctcccctagttcttaccctccgagggcaatttgcttcatccctttccctggcaacccacttgacaacaattgcaaagctggagaaatgcctctgaactggtacaacatgtcagagttcatgtgtggaaaagttagcaactgcttgggaccagagttcgcaagatttgataagtcaaatacgagcagaagccctgcttttgatttggctcttgtgactagagttgttgaagtcacaaacatggaacatggcaagttcctgaatgttgattgcaatcccagcaaaggcacaatggtgggggagtttgactgtcctcaagatgcgtggttctttgatggttcttgcaatgatgggcacatgccttattccatcatcatggaaatcggacttcagacatccggtgttctcaccagtgtgttgaaagcaccactgacgatggacaaagatgacattctctttaggaaccttgatgcaagtgctgaaatggtgaggccagatgtggatgtgagggggaaaaccataaggaatgtgaccaagtgcactggatatgcaatgttgggaaagatggggattcacagattcacgtttgagttgtctgttgatggcgtggttttctacaaaggaagcacttcctttggatggttcactccagaggtgtttgctcagcaagctggacttgacaatgggaaaaagacggagccttggtgcaaaactaacaacacgagtgtgagaagagttgaaatcgcatcagccaaaggcaaagaacagctgactgagaaacttccagatgcaactaatgctcaagttctcagaaggtcagaacagtgtgagtatttggattacctcaacattgctcctgattctgggctgcatgggaaaggatatgcgcatggacacaaagatgttaacccacaagactggttcttctcttgtcacttttggtttgatcctgtgatgcctggatctttgggaattgagtcaatgttccagctcattgaggcatttgcggtggaccagaacataccgggagaatacaatgtgagcaatccgacctttgcccatgcccctggaaaaacggcgtggaagtaccgtggtcaattgacaccaaagaaccgtgcgatggactgtgaggtgcacatagtttcaatcacagcctctcctgaaaatggaggctacgttgacatagtggcagatggagcactttgggttgatggtctccgtgtgtatgaagccaaagaactcagagttcgtgttgtcagtgcaaaacctcaagccattccggatgttcaacaacagccacccagcgcaaaagcggaccctgggaaaactggagttgcactcagtccgactcagttgagagatgtcctgcttgaagtggacaatccattgtatcttggtgttgaaaactccaatttggtgcagtttgaatccaaacctgcaacttcttcaaggattgtcagtatcaaaccatgctccataagtgatcttggtgacaagtccttcatggaaacgtacaatgtgtcagcacctctgtacactggagcaatggccaagggaattgcgtctgcggaccttgtcattgctgctgggaagaggaagatattgggttcttttggagcgggtgggcttccaatgcaccatgtgagggcagctttggagaagatacaagcggctctgcctcaaggaccatatgctgtgaacctcattcattcaccttttgacagcaacttggaaaaggggaatgttgatctcttcctcgaaaagggcgttactgtggtggaggcttctgcattcatgaccctcactccccaagttgttcgttaccgtgcagccggactctcaaggaacgctgatgggagtgtcaacatcagaaaccgtatcattggaaaagtgtccagaacagaactcgccgaaatgttcatcagaccggctccggaacacctccttgagaaactcatagcttctggtgagataacacaagaacaagccgaacttgcccgtcgtgttcctgtcgcagacgacatcgctgttgaagctgattctggtggtcacactgacaaccgtcccatccacgtcatcttgcctttgatcatcaaccttaggaacagactgcacagagagtgtggttatcctgcgcaccttagagtcagagttggagctggaggcggtgttggctgcccacaagctgctgcggctgccctcacaatgggagctgccttcatagtgactgggactgtcaatcaagttgctaaacagtccgggacatgtgacaacgtgagaaaacaactcagtcaagccacctacagtgacatttgcatggctccagcagctgatatgtttgaggaaggtgtgaaactccaagttctcaagaagggaacaatgttcccatcaagagctaacaaattgtacgaactcttttgcaagtacgactctttcgattcaatgcctcctgctgaacttgaaaggatcgagaagaggatcttcaagagggcacttcaagaggtctgggaagagaccaaggacttttacatcaatggtttgaagaatccagagaagatacagagagcggaacatgaccccaaactcaagatgtctttgtgtttcagatggtatcttggtcttgcatcacgttgggccaacatgggtgctcctgatcgtgtcatggactatcaagtctggtgtggtccagccattggagccttcaatgacttcatcaaaggaacatatcttgatcctgctgtctctaatgagtacccatgtgttgtccagatcaaccttcagattttgcgtggtgcatgttacctgaggcgtcttaatgctctgagaaatgatccgaggattgatcttgagactgaagatgctgcctttgtctatgagccaacgaatgcgctttgagtagttagcttaatcacttaggtcacccagtccaagcccggcctagcacgatgatcatgagtgttgctattgatgtatgttaatactatacacagtcatcgtgtgtgttttataaaactgtaagcttaggatgtttgaggctaatgtaattagcactacaccgtaataaatgagaggtttactttatgttttaataatgttcttacccttgctgctctctaaactgtaatggcgtacggttagctaaactaaagtaaaaatcgattcgcttgagtaaaattagtgaccgggaaagatcatcgactactactgctcagagatgtaatcggtaattaagacttcaagctcaataattaattaggagtaaatctggcttcgaatttttaaattgtcaacttccaaagaaggattggcaagactcaatctcaattgcccaacaaacatatggctctttacaaatttggaatctctttttgatggcaagaacgtcgtaattcctctgtcgatctcatgtaattaccaaactcatctacttattactttctttatatgcacttactgatgcggccgcttaattaatcacgagtggatgactgtcacgactgactcatgactgactactagtgctagcctcgaggtcgacacaactttgtataataaagttgtctagacctaggagctgtgctgggtaactcacatgagtcactggtcacatcagcggccgcagcttatagtaaagatttttttgttaataaaatgaaagttaatatttatggatttatttgaacatatttacaagtttttgttaataaatttatttacagaagtgttaaatttgaaaatgtgttaaatgagagttaatatttatggatataatattactttatttaaaaataaaatgaatttatattaaaatatgatttggtaaaagatattataaagaggaacttggatgagaaagacgacgatgggcaaaagttgcatggcacaccgcttttgttcagtaacatctgcactgtggcgcctttttcacactcaccatgcatgctgccacgtcagctttcacactatgacaccactggccatacacgttgccacctcagctttctcctcttctcactatgacacgactggccatgcatgcatgcatgctgccacctcagctcccgcctcttcacccgtgtctttctctcatgtcgcagtgctgcgtgccaacctcttctctctataaatagagagaagagaatgatggttaaactcaaaccaaaacaagaaaacatacacaaatagcaaaacggatccacaaccaaaaatgcttcagcacacttggcttccgaagcctcccaatctgaccctcttgtcagatgaggttcatctctggaggattcctcttgaccagcctgagtcacaacttcaagaccttgctgccaccctgagcagtgatgaattggcgagggcaaacagattctactttccagaacacagaaggcgtttcactgctgggagaggcatcctcagatccatcttgggtggatacttgggagtggaaccgggtcaagtcaagtttgattatgagtcccgtgggaaaccgatccttggtgacagatttgctgagagtggactcctgttcaacttgtctcacagccagaaccttgccttgtgtgctgtcaactacacgcgtcaaataggcattgatcttgaatatctgcgtccaacatctgacttggagtctcttgcaaagaggttctttctcccaagagaatatgaactcttgaggtcactccctgatgagcagaaacagaagattttctttcgttactggacttgcaaagaggcttatctcaaagcaacgggagatggaatagccaaacttgaagagatcgagatagcactcaccccaacagaacctgccaagctccaaacagctcctgcgtggtctctgttggagcttgtgccagatgacaattgtgttgcagctgtggctgttgcgggttttggttggcagcccaagttctggcattactgagtagttagcttaatcacttaggtcacccagtccaagcccggcctagcacgatgatcatgagtgttgctattgatgtatgttaatactatacacagtcatcgtgtgtgttttataaaactgtaagcttaggatgtttgaggctaatgtaattagcactacaccgtaataaatgagaggtttactttatgttttaataatgttcttacccttgctgctctctaaactgtaatggcgtacggttagctaaactaaagtaaaaatcgattcgcttgagtaaaattagtgaccgggaaagatcatcgactactactgctcagagatgtaatcggtaattaagacttcaagctcaataattaattaggagtaaatctggcttcgaatttttaaattgtcaacttccaaagaaggattggcaagactcaatctcaattgcccaacaaacatatggctctttacaaatttggaatctctttttgatggcaagaacgtcgtaattcctctgtcgatctcatgtaattaccaaactcatctacttattactttctttatatgcacttactgatgcggccgcttaattaactactgtcactgaggccgtagacgagtacggactgatctaactagtgctagcctcgaggtcgacacccagctttc

SEQ ID NO: 36 - DNA, 36102 bp, Artificial sequence
  plasmid pDAB7370
ttgtacaaagtggttgcggccgcttaattaaatttaaattcaattaatgcaatcttgattttcaacaacgaaggtaatggcgtaaaagaaaaaatgtatgttattgtattgatctttcatgatgttgaagcgtgccataatatgatgatgtataattaaaatattaactgtcgcattttattgaaatggcactgttatttcaaccatatctttgattctgttacatgacacgactgcaagaagtaaataatagacgccgttgttaaagaattgctatcatatgtgcctaactagagggaatttgagcgtcagacctaatcaaatattacaaaatatctcactctgtcgccagcaatggtgtaatcagcgcagacaaatggcgtaaagatcgcggaaaaacctccccgagtggcatgatagctgcctctgtattgctgatttagtcagccttatttgacttaagggtgccctcgttagtgacaaattgctttcaaggagacagccatgccccacactttgttgaaaaacaaattgcctttggggagacggtaaagccagttgctcttcaataaggaatgtcgaggaggcaatgtaaccgcctctggtagtacacttctctaatccaaaaatcaatttgtattcaagataccgcaaaaaacttatggtttaaaccctgcaggactagtccagaaggtaattatccaagatgtagcatcaagaatccaatgtttacgggaaaaactatggaagtattatgtaagctcagcaagaagcagatcaatatgcggcacatatgcaacctatgttcaaaaatgaagaatgtacagatacaagatcctatactgccagaatacgaagaagaatacgtagaaattgaaaaagaagaaccaggcgaagaaaagaatcttgaagacgtaagcactgacgacaacaatgaaaagaagaagataaggtcggtgattgtgaaagagacatagaggacacatgtaaggtggaaaatgtaagggcggaaagtaaccttatcacaaaggaatcttatcccccactacttatccttttatatttttccgtgtcatttttgcccttgagttttcctatataaggaaccaagttcggcatttgtgaaaacaagaaaaaatttggtgtaagctattttctttgaagtactgaggatacaacttcagagaaatttgtaagtttgtaggtaccagatctggatcccaaaccatgtctccggagaggagaccagttgagattaggccagctacagcagctgatatggccgcggtttgtgatatcgttaaccattacattgagacgtctacagtgaactttaggacagagccacaaacaccacaagagtggattgatgatctagagaggttgcaagatagatacccttggttggttgctgaggttgagggtgttgtggctggtattgcttacgctgggccctggaaggctaggaacgcttacgattggacagttgagagtactgtttacgtgtcacataggcatcaaaggttgggcctaggatctacattgtacacacatttgcttaagtctatggaggcgcaaggttttaagtctgtggttgctgttataggccttccaaacgatccatctgttaggttgcatgaggctttgggatacacagcccggggtacattgcgcgcagctggatacaagcatggtggatggcatgatgttggtttttggcaaagggattttgagttgccagctcctccaaggccagttaggccagttacccaaatctgagtagttagcttaatcacctagagctcgatcggcggcaatagcttcttagcgccatcccgggttgatcctatctgtgttgaaatagttgcggtgggcaaggctctctttcagaaagacaggcggccaaaggaacccaaggtgaggtgggctatggctctcagttccttgtggaagcgcttggtctaaggtgcagaggtgttagcgggatgaagcaaaagtgtccgattgtaacaagatatgttgatcctacgtaaggatattaaagtatgtattcatcactaatataatcagtgtattccaatatgtactacgatttccaatgtctttattgtcgccgtatgtaatcggcgtcacaaaataatccccggtgactttcttttaatccaggatgaaataatatgttattataatttttgcgatttggtccgttataggaattgaagtgtgcttgaggtcggtcgccaccactcccatttcataattttacatgtatttgaaaaataaaaatttatggtattcaatttaaacacgtatacttgtaaagaatgatatcttgaaagaaatatagtttaaatatttattgataaaataacaagtcaggtattatagtccaagcaaaaacataaatttattgatgcaagtttaaattcagaaatatttcaataactgattatatcagctggtacattgccgtagatgaaagactgagtgcgatattatggtgtaatacataggaattcgtttaaacgatctgcgtctaattttcggtccaacttgcacaggaaagacgtcgaccgcggtagctcttgcccagcagactgggcttccagtcctttcgctcgatcgggtccaatgttgtcctcagctgtgaaccggaagcggacgaccaacagtggaagaactgaaaggaacgagccgtctataccttgatgatcggcctctggtgaagggtatcatcgcagccaagcaagctcatgaaaggctgatgggggaggtgtataattatgaggcccacggcgggcttattctttagggaggatctatctcgttgctcaagtgcatggcgcaaagcagttattggagtgcggattttcgttggcatattattcgccacgagttagcagacgaagagaccttcatgaacgtggccaaggccagagttaagcagatgttacgccctgctgcaggcctttctattatccaatagttggttgatctttggaaagagcctcggctgaggcccatactgaaagagatcgatggatatcgatatgccatgttgtttgctagccagaaccagatcacatccgatatgctattgcagcttgacgcagatatggaggataagttgattcatgggatcgctcaggagtagctcatccatgcacgccgacaagaacagaaattccgtcgagttaacgcagccgcttacgacggattcgaaggtcatccattcggaatgtattagtttgcaccagctccgcgtcacacctgtcttcatttgaataagatgttagcaattgtttttagctttgtcttgttgtggcagggcggcaagtgcttcagacatcattctgttttcaaattttatgctggagaacagcttcttaattcctttggaaataatagactgcgtcttaaaattcagatgtctggatatagatatgattgtaaaataacctatttaagtgtcatttagaacataagttttatgaatgttcttccattttcgtcatcgaacgaataagagtaaatacaccttttttaacattacaaataagttcttatacgttgtttatacaccgggaatcatttccattattttcgcgcaaaagtcacggatattcgtgaaagcgacataaactgcgaaatttgcggggagtgtcttgagtttgcctcgaggctagcgcatgcacatagacacacacatcatctcattgatgcttggtaataattgtcattagattgtttttatgcatagatgcactcgaaatcagccaattttagacaagtatcaaacggatgtgacttcagtacattaaaaacgtccgcaatgtgttattaagttgtctaagcgtcaatttgatttacaattgaatatatcctgccccagccagccaacagctcgatttacaattgaatatatcctgccggccggcccacgcgtgtcgaggaattctgatctggcccccatttggacgtgaatgtagacacgtcgaaataaagatttccgaattagaataatttgtttattgctttcgcctataaatacgacggatcgtaatttgtcgttttatcaaaatgtactttcattttataataacgctgcggacatctacatttttgaattgaaaaaaaattggtaattactctttctttttctccatattgaccatcatactcattgctgatccatgtagatttcccggacatgaagccatttacaattgaatatatcctgccgccgctgccgctttgcacccggtggagcttgcatgttggtttctacgcagaactgagccggttaggcagataatttccattgagaactgagccatgtgcaccttccccccaacacggtgagcgacggggcaacggagtgatccacatgggacttttaaacatcatccgtcggatggcgttgcgagagaagcagtcgatccgtgagatcagccgacgcaccgggcaggcgcgcaacacgatcgcaaagtatttgaacgcaggtacaatcgagccgacgttcacgcggaacgaccaagcaagcttggctgccatttttggggtgaggccgttcgcggccgaggggcgcagcccctggggggatgggaggcccgcgttagcgggccgggagggttcgagaagggggggcaccccccttcggcgtgcgcggtcacgcgcacagggcgcagccctggttaaaaacaaggtttataaatattggtttaaaagcaggttaaaagacaggttagcggtggccgaaaaacgggcggaaacccttgcaaatgctggattttctgcctgtggacagcccctcaaatgtcaataggtgcgcccctcatctgtcagcactctgcccctcaagtgtcaaggatcgcgcccctcatctgtcagtagtcgcgcccctcaagtgtcaataccgcagggcacttatccccaggcttgtccacatcatctgtgggaaactcgcgtaaaatcaggcgttttcgccgatttgcgaggctggccagctccacgtcgccggccgaaatcgagcctgcccctcatctgtcaacgccgcgccgggtgagtcggcccctcaagtgtcaacgtccgcccctcatctgtcagtgagggccaagttttccgcgaggtatccacaacgccggcggccgcggtgtctcgcacacggcttcgacggcgtttctggcgcgtttgcagggccatagacggccgccagcccagcggcgagggcaaccagcccggtgagcgtcggaaagggtcgacggatcttttccgctgcataaccctgcttcggggtcattatagcgattttttcggtatatccatcctttttcgcacgatatacaggattttgccaaagggttcgtgtagactttccttggtgtatccaacggcgtcagccgggcaggataggtgaagtaggcccacccgcgagcgggtgttccttcttcactgtcccttattcgcacctggcggtgctcaacgggaatcctgctctgcgaggctggccggctaccgccggcgtaacagatgagggcaagcggatggctgatgaaaccaagccaaccaggaagggcagcccacctatcaaggtgtactgccttccagacgaacgaagagcgattgaggaaaaggcggcggcggccggcatgagcctgtcggcctacctgctggccgtcggccagggctacaaaatcacgggcgtcgtggactatgagcacgtccgcgagctggcccgcatcaatggcgacctgggccgcctgggcggcctgctgaaactctggctcaccgacgacccgcgcacggcgcggttcggtgatgccacgatcctcgccctgctggcgaagatcgaagagaagcaggacgagcttggcaaggtcatgatgggcgtggtccgcccgagggcagagccatgacttttttagccgctaaaacggccggggggtgcgcgtgattgccaagcacgtccccatgcgctccatcaagaagagcgacttcgcggagctggtattcgtgcagggcaagattcggaataccaagtacgagaaggacggccagacggtctacgggaccgacttcattgccgataaggtggattatctggacaccaaggcaccaggcgggtcaaatcaggaataagggcacattgccccggcgtgagtcggggcaatcccgcaaggagggtgaatgaatcggacgtttgaccggaaggcatacaggcaagaactgatcgacgcggggttttccgccgaggatgccgaaaccatcgcaagccgcaccgtcatgcgtgcgccccgcgaaaccttccagtccgtcggctcgatggtccagcaagctacggccaagatcgagcgcgacagcgtgcaactggctccccctgccctgcccgcgccatcggccgccgtggagcgttcgcgtcgtctcgaacaggaggcggcaggtttggcgaagtcgatgaccatcgacacgcgaggaactatgacgaccaagaagcgaaaaaccgccggcgaggacctggcaaaacaggtcagcgaggccaagcaggccgcgttgctgaaacacacgaagcagcagatcaaggaaatgcagctttccttgttcgatattgcgccgtggccggacacgatgcgagcgatgccaaacgacacggcccgctctgccctgttcaccacgcgcaacaagaaaatcccgcgcgaggcgctgcaaaacaaggtcattttccacgtcaacaaggacgtgaagatcacctacaccggcgtcgagctgcgggccgacgatgacgaactggtgtggcagcaggtgttggagtacgcgaagcgcacccctatcggcgagccgatcaccttcacgttctacgagctttgccaggacctgggctggtcgatcaatggccggtattacacgaaggccgaggaatgcctgtcgcgcctacaggcgacggcgatgggcttcacgtccgaccgcgttgggcacctggaatcggtgtcgctgctgcaccgcttccgcgtcctggaccgtggcaagaaaacgtcccgttgccaggtcctgatcgacgaggaaatcgtcgtgctgtttgctggcgaccactacacgaaattcatatgggagaagtaccgcaagctgtcgccgacggcccgacggatgttcgactatttcagctcgcaccgggagccgtacccgctcaagctggaaaccttccgcctcatgtgcggatcggattccacccgcgtgaagaagtggcgcgagcaggtcggcgaagcctgcgaagagttgcgaggcagcggcctggtggaacacgcctgggtcaatgatgacctggtgcattgcaaacgctagggccttgtggggtcagttccggctgggggttcagcagccagcgctttactggcatttcaggaacaagcgggcactgctcgacgcacttgcttcgctcagtatcgctcgggacgcacggcgcgctctacgaactgccgataaacagaggattaaaattgacaattgtgattaaggctcagattcgacggcttggagcggccgacgtgcaggatttccgcgagatccgattgtcggccctgaagaaagctccagagatgttcgggtccgtttacgagcacgaggagaaaaagcccatggaggcgttcgctgaacggttgcgagatgccgtggcattcggcgcctacatcgacggcgagatcattgggctgtcggtcttcaaacaggaggacggccccaaggacgctcacaaggcgcatctgtccggcgttttcgtggagcccgaacagcgaggccgaggggtcgccggtatgctgctgcgggcgttgccggcgggtttattgctcgtgatgatcgtccgacagattccaacgggaatctggtggatgcgcatcttcatcctcggcgcacttaatatttcgctattctggagcttgttgtttatttcggtctaccgcctgccgggcggggtcgcggcgacggtaggcgctgtgcagccgctgatggtcgtgttcatctctgccgctctgctaggtagcccgatacgattgatggcggtcctgggggctatttgcggaactgcgggcgtggcgctgttggtgttgacaccaaacgcagcgctagatcctgtcggcgtcgcagcgggcctggcgggggcggtttccatggcgttcggaaccgtgctgacccgcaagtggcaacctcccgtgcctctgctcacctttaccgcctggcaactggcggccggaggacttctgctcgttccagtagctttagtgtttgatccgccaatcccgatgcctacaggaaccaatgttctcggcctggcgtggctcggcctgatcggagcgggtttaacctacttcctttggttccgggggatctcgcgactcgaacctacagttgtttccttactgggctttctcagcccccgagcgcttagtgggaatttgtaccccttatcgaaccgggagcacaggatgacgcctaacaattcattcaagccgacaccgcttcgcggcgcggcttaattcaggagttaaacatcatgagggaagcggtgatcgccgaagtatcgactcaactatcagaggtagttggcgtcatcgagcgccatctcgaaccgacgttgctggccgtacatttgtacggctccgcagtggatggcggcctgaagccacacagtgatattgatttgctggttacggtgaccgtaaggcttgatgaaacaacgcggcgagctttgatcaacgaccttttggaaacttcggcttcccctggagagagcgagattctccgcgctgtagaagtcaccattgttgtgcacgacgacatcattccgtggcgttatccagctaagcgcgaactgcaatttggagaatggcagcgcaatgacattcttgcaggtatcttcgagccagccacgatcgacattgatctggctatcttgctgacaaaagcaagagaacatagcgttgccttggtaggtccagcggcggaggaactctttgatccggttcctgaacaggatctatttgaggcgctaaatgaaaccttaacgctatggaactcgccgcccgactgggctggcgatgagcgaaatgtagtgcttacgttgtcccgcatttggtacagcgcagtaaccggcaaaatcgcgccgaaggatgtcgctgccgactgggcaatggagcgcctgccggcccagtatcagcccgtcatacttgaagctaggcaggcttatcttggacaagaagatcgcttggcctcgcgcgcagatcagttggaagaatttgttcactacgtgaaaggcgagatcaccaaggtagtcggcaaataatgtctaacaattcgttcaagccgacgccgcttcgcggcgcggcttaactcaagcgttagagagctggggaagactatgcgcgatctgttgaaggtggttctaagcctcgtcttgcgatggcatttcgatccattcccattccgcgctcaagatggcttcccctcggcagttcatcagggctaaatcaatctagccgacttgtccggtgaaatgggctgcactccaacagaaacaatcaaacaaacatacacagcgacttattcacacgagctcaaattacaacggtatatatcctgccagtcagcatcatcacaccaaaagttaggcccgaatagtttgaaattagaaagctcgcaattgaggtctacaggccaaattcgctcttagccgtacaatattactcaccggatcctaaccggtttaattaaggcgcgccatgcccgggcaagcggccgcacaagtttgtacaaaaaagcaggcttctagacctaggtggagtcatcacgcagactatctcagcatgtgcgtagcacgcggccgcagcttatagtaaagatttttttgttaataaaatgaaagttaatatttatggatttatttgaacatatttacaagtttttgttaataaatttatttacagaagtgttaaatttgaaaatgtgttaaatgagagttaatatttatggatataatattactttatttaaaaataaaatgaatttatattaaaatatgatttggtaaaagatattataaagaggaacttggatgagaaagacgacgatgggcaaaagttgcatggcacaccgcttttgttcagtaacatctgcactgtggcgcctttttcacactcaccatgcatgctgccacgtcagctttcacactatgacaccactggccatacacgttgccacctcagctttctcctcttctcactatgacacgactggccatgcatgcatgcatgctgccacctcagctcccgcctcttcacccgtgtctttctctcatgtcgcagtgctgcgtgccaacctcttctctctataaatagagagaagagaatgatggttaaactcaaaccaaaacaagaaaacatacacaaatagcaaaacggatccacaaccaaaaatggcttcctctatgctctcttccgctactatggttgcctctccggctcaggccactatggtcgctcctttcaacggacttaagtcctccgctgccttcccagccacccgcaaggctaacaacgacattacttccatcacaagcaacggcggaagagttaactgcatgcaggtgtggcctccgattggaaagaagaagtttgagactctctcttaccttcctgaccttaccgattccgaagcagcgaggctgcaagagcagaaaggaggtgagatggacacgaggattgcgatcataggcatgagcgccatacttccttgtggaaccacggtgagagagtcatgggagaccataagggctggcattgattgcctgtctgatcttcctgaggatcgtgttgatgtgactgcgtactttgacccagtcaagaccacaaaggacaaaatctactgcaagagaggaggtttcattcctgagtatgactttgatgcgcgtgagtttggtctcaacatgttccagatggaagattctgatgcgaatcagaccatctcacttctcaaggtcaaagaagcacttcaagatgctgggattgatgcacttggaaaggagaagaaaaacataggatgcgtgcttggcattggaggtggacagaagagttcacatgagttctacagcagactcaactatgtggttgtggagaaagtcttgagaaagatggggatgccagaggaagatgtcaaagtggctgtggagaagtacaaagcgaacttcccagaatggagacttgactctttccctggattccttgggaatgtcactgctggcagatgcaccaacacattcaacttggatggcatgaactgcgttgtggatgctgcatgtgcaagctccttgatagcagtcaaggttgcgattgatgaactgctctatggtgactgcgacatgatggtcactggtgcaacctgcacagacaactccattgggatgtacatggctttctcaaagacacctgtgttcagcacggacccaagtgtgagagcgtatgatgagaaaacgaaagggatgctcattggtgagggatcagccatgttggtgctcaaacgttatgcagatgcagtgagggatggtgatgagattcatgctgtgattcgtggttgtgcaagctcaagtgatggcaaagcagctggcatctacactcccacaatcagtggtcaagaggaagccttgagacgtgcatacaatcgtgcctgcgttgaccctgccactgtcactttggttgagggtcatgggactggcactccagttggagataggattgagttgactgcgttgaggaacttgtttgacaaagcgtatggtgaagggaacacagagaaagttgcagttggaagtatcaagtccagtattggtcatttgaaggctgttgctggtcttgctggaatgatcaaggtcatcatggctctcaaacacaagactttgcctggaacgatcaatgtggacaatccacccaatctctatgacaacactcccatcaatgagtcatccctctacatcaacacgatgaacagaccctggttccctccacctggtgttccgagacgtgctggaatatccagctttggctttggaggtgccaactaccatgcagtgttggaagaggctgaaccagagcacacgacagcgtacagactcaacaaacgtccacaaccggtgttgatgatggctgcaactcctgctgcgttgcagagcctttgtgaagctcagctgaaagagtttgaagctgcgatcaaggagaatgagacagtcaagaatactgcctacatcaagtgtgtcaagtttggagaacagttcaagttccctgggagcatacctgcgaccaatgcgagactgggattcttggtcaaagatgcggaggatgcgtgctccacgcttcgtgctatatgtgctcagtttgccaaagatgtgaccaaagaagcgtggaggcttccgagagaaggagtttctttccgtgccaaaggcattgccaccaatggtgctgttgctgcactcttctctggacaaggtgctcagtacacacacatgttcagtgaagttgcgatgaactggcctcagttcagacagtccattgctgcaatggacgctgcacagtccaaggttgctggaagtgacaaagactttgaaagagtctctcaagtcctgtacccaaggaaaccgtacgaacgtgagccagaacaagatcacaagaaaatctcactcacagcatacagccagccgtcaaccctggcatgtgctcttggtgcctttgagattttcaaggaagctggattcactccagactttgcagctggacacagcttgggtgagtttgctgcgctctatgcagctggttgtgttgacagagatgagttgtttgaacttgtttgcagaagggcaaggatcatgggaggcaaagatgcacctgccacacccaaaggttgcatggcagctgtcataggacccaacgcagagaacatcaaggttcaagctgccaacgtctggcttggaaactcaaactctccgtctcagactgtcattactgggtctgttgaagggattcaagctgaaagtgccagattgcagaaggaagggttcagagttgtgcctcttgcttgtgagtctgccttccattctccacagatggaaaatgccagctcagctttcaaagatgtcatatccaaggtttccttccgtacacccaaagcagaaacaaagctcttcagcaatgtttctggagagacctatccgacggatgccagagagatgctcactcaacacatgacctcatctgtgaagttcctgacccaagtgaggaacatgcaccaagctggtgcgagaatctttgttgagtttggaccgaaacaagttctcagcaaacttgtttctgaaaccctcaaagatgacccgtctgttgtcacagtgtctgtgaacccagcttctggcacggactctgacatacagttgagggatgctgcagttcagctggttgtggctggtgtcaatcttcaagggtttgacaagtgggatgctcctgatgccacgaggatgcaagccatcaagaaaaagagaaccacactcagactttcagctgccacctatgtcagtgacaagaccaagaaagtgagggatgctgccatgaacgacggaagatgtgtcacatacctcaagggtgctgcaccactcatcaaggctcctgaacctgtggttgacgaagctgccaagagggaggctgaaaggcttcagaaggagcttcaagacgctcagaggcagcttgacgacgccaaacgtgcagctgcagaagccaactccaaacttgctgctgccaaggaggaagccaagactgctgcagcttcagccaagcctgcagttgacactgctgttgtggagaaacatcgtgccatcctcaagtccatgctggctgagctggatggttatggaagtgttgatgcttcttcccttcagcaacagcaacagcaacagactgctccggcgcctgttaaagccgctgcccctgccgctcccgttgcaagtgctcctgctcccgccgtgtccaacgagttgcttgagaaagctgagacagttgtgatggaggttctcgctgccaagactggatacgaaacagacatgattgaggcggacatggagcttgagactgagttgggaattgacagcatcaagagggttgaaattctttctgaagtccaagctatgcttaacgttgaggcgaaagatgttgatgctctctctaggacgagaacagtgggtgaagttgtcaacgctatgaaggcagaaatcgctggttcttccgctccggcgccggcagctgccgcacctgcaccggctaaagcggctccagctgcagctgcaccagctgtttctaatgagctgctcgaaaaggcagaaactgttgtgatggaagtccttgctgccaaaactggctacgaaactgacatgatagaatcagacatggagcttgagacggagcttggaattgattccatcaagcgtgtggaaatcctcagtgaagtccaagccatgctcaatgtggaagctaaggatgtggatgctctctcaaggaccagaactgtcggtgaggttgtcaatgccatgaaggctgagatagctggaggctccgctcctgcgccggccgctgccgctcctggtcccgctgccgcggctccagctccagctgcagccgctccggccgtctcaaacgaactccttgaaaaagctgagaccgtcgtgatggaggtcttggcagctaaaaccggctatgagactgacatgattgagtctgacatggaattggagacagaacttgggatagacagcatcaaacgtgttgaaatcctcagtgaggtccaagctatgctgaacgtggaagcgaaggatgttgatgctctgtccagaacgaggaccgttggtgaggttgtggatgccatgaaggctgaaattgctggagggtctgcgcccgcgccagctgcagccgctcctgcacccgcagccgcggcacctgctccagctgcacctgcacctgccgtttcttcagaactcttggagaaggctgagacggttgtgatggaggttttggctgcaaagactggctatgagaccgacatgattgaatctgatatggaattggagacagagcttgggatcgattccatcaaaagagtggagatcctgagtgaagtccaagccatgctcaatgttgaagctaaggatgttgatgcactttcaagaacaaggacagtgggtgaggttgtggatgccatgaaggcggagattgctggagggagcgcgcctgcgccagctgccgcggcacctgcaccggcagccgcagctccagctccagctgcaccagcaccggccgcgcccgcgccagctgtttcatccgaactcctggaaaaggccgagacggttgtgatggaggtgctcgcagctaagactggttacgagaccgacatgattgaaagtgacatggagcttgaaaccgagttgggaatagatagcatcaaacgtgttgaaatcttgtctgaggtccaagctatgttgaacgtggaggcaaaagatgtcgatgcgctttcaagaaccagaacagtcggtgaggtcgtggacgccatgaaggctgaaattgccggaagctctgctagtgcgccagctgcagccgcacctgcacctgctgccgcggcacctgctccagctgcagccgctcctgccgtcagcaatgagttgctggagaaagccgaaacagttgtgatggaagtccttgctgcaaaaactggttacgaaacggacatgattgagtcagacatggaattggagaccgaacttggaatagattccatcaagagagtggagatcctctctgaggtgcaagccatgctcaacgttgaggctaaagatgttgatgcactcagtaggacaagaactgtgggggaagttgtcgatgcgatgaaggctgagattgctggaggctctgctcctgcgccggcagctgccgcacctgcacccgcagccgcggcaccagctgtcagcaacgaattgcttgagaaggctgaaacagttgtcatggaagtgctggctgcaaaaaccggctatgagactgacatgattgagtctgacatggaacttgagacggaattgggcattgacagcatcaagcgtgttgagatcctcagtgaagtccaagcaatgctcaatgtggaggctaaggatgtggatgccctctcaaggaccagaacagttggtgaggtcgttgatgcgatgaaggcggagatcgctggaagttccgcgcctgcgccagctgcagccgctcctgcacccgcagccgcggcaccggctccagctgcagccgcaccggccgtctcctcagaactcctggaaaaggctgagacagttgtgatggaagtccttgctgcgaaaactggctatgagaccgacatgattgaatctgacatggaactggagaccgagcttggaattgactccatcaaacgtgttgaaatcctctctgaggttcaagcgatgttgaatgtggaggccaaagatgttgatgctctttccagaacaaggacggtgggagaggtggttgatgccatgaaggctgagatagctgggggttctgctcctgcgccagctgcagccgctcctgctcccgctgccgcggcaccagctgtcagcaacgaactccttgaaaaagctgaaactgttgtgatggaggttttggctgcaaagactggatacgagactgacatgatagagtcagacatggagttggaaacagagcttgggattgatagcatcaagcgtgtggaaatcctttctgaggttcaagccatgctgaacgttgaggccaaagatgtcgatgctttgtcaaggaccagaacggttggagaagtggtcgatgccatgaaggctgagatagctggtggatcagcccctgctccggctgcagccgctcctgcaagtgccggtgctgcaccagctgtgaagattgattcagttcatggtgctgactgtgacgatttgtcactgatgcacgcaaaggtggttgacatcagaaggccagatgaactgattctggaaagaccggagaaccgtccagttcttgtcgttgacgatggctcagagttgacacttgctcttgtgagggtgttgggagcctgtgcagttgtcttgacctttgagggattgcagttggctcagagagctggtgcagctgccattcgtcatgttctggctaaggacctttcagcagaatcagctgagaaggccatcaaagaggctgagcaaagatttggagcgttgggaggcttcataagccagcaagcagaaaggtttgaaccagctgagatactgggtttcacactcatgtgtgcgaagtttgccaaagcctctctctgcactgctgtggctggaggtcgtcctgccttcatcggtgtggctaggcttgacggcagacttggattcacctctcaaggcacttctgacgcactcaagagagcacagcgtggagcgatctttggactctgcaagacaatagggttggagtggtcagaatctgatgtgttcagccgtggtgtggacattgctcaagggatgcacccagaagatgctgcagttgccatagttagggagatggcgtgtgctgacatcagaatcagagaggttgggattggagcaaaccagcaaagatgcacaatcagagctgccaagttggagactgggaaccctcagagacagatagcgaaagacgatgtgcttctggtttctggaggtgctcgtgggatcacacctctttgcatccgtgagatcacgcgtcagattgctggaggcaagtacattctgttgggtcgtagcaaagtttctgcgtctgaaccagcatggtgtgctggcatcactgatgagaaggctgtgcagaaagctgccacccaagagttgaagagggccttcagtgctggtgaaggacccaaacccactccaagggctgtcacgaaacttgtgggatctgttcttggtgctcgtgaagtgagaagctccattgctgccattgaagctctgggtggcaaagcgatctacagctcttgtgatgtgaactctgctgcagatgttgccaaagcagttagggatgcagagtcccagcttggtgccagagttagtggaatcgttcacgcttctggtgtgctccgtgatcgtctcatagagaagaaactccctgacgagtttgatgctgtctttgggaccaaagtcactgggttggagaatcttctggctgcagttgatcgtgccaacctcaaacacatggttctcttcagctcccttgctggtttccacggcaatgttggtcagtctgactatgcgatggcaaacgaagctctcaacaagatgggtttggaacttgcgaaggatgtcagtgtcaagtccatctgctttggtccctgggatggtgggatggtgacacctcaactcaagaaacagtttcaagaaatgggagttcagatcattcctcgtgaaggaggtgctgatacagttgcgaggattgtgttgggatcaagtcctgctgagatccttgttggaaactggaggacaccatccaagaaagttggaagtgacacgatcaccctgcatagaaagatcagtgccaagtccaatcccttcttggaggatcatgtcatacaaggcagaagggtgttgccaatgacccttgctattgggagccttgctgagacctgccttggactcttccctggctactctctctgggccatagatgacgcacagctcttcaaaggtgtcactgttgatggagacgtcaactgtgaagtgaccctcacaccgtccactgctccgagtgggagggtgaatgtccaagcgacgctcaagacgttctcaagtggaaaacttgttccagcctacagagctgtcatagtgttgtccaaccaaggtgctccacctgccaatgcaaccatgcagcctccgagccttgatgcagatcctgctttgcaagggtcagtctatgatggcaagactctctttcatggtcctgcgttcagaggcattgatgacgttctcagctgcaccaagagccagcttgttgccaagtgttctgctgttcctggatcagatgcagccagaggagagtttgcaactgacactgatgcacatgatccctttgtcaatgatcttgcctttcaagcaatgttggtctgggtgaggagaacgctgggacaagctgcactcccgaactccattcagaggatagtccaacacagaccggtcccacaagacaaacccttctacatcaccctcagatccaatcagagtggtggacatagccagcacaaacatgcacttcagttccacaacgaacaaggtgatctcttcattgatgttcaagcctctgtcattgcgacagactcacttgcgttctgagtagttagcttaatcacttaggtcacccagtccaagcccggcctagcacgatgatcatgagtgttgctattgatgtatgttaatactatacacagtcatcgtgtgtgttttataaaactgtaagcttaggatgtttgaggctaatgtaattagcactacaccgtaataaatgagaggtttactttatgttttaataatgttcttacccttgctgctctctaaactgtaatggcgtacggttagctaaactaaagtaaaaatcgattcgcttgagtaaaattagtgaccgggaaagatcatcgactactactgctcagagatgtaatcggtaattaagacttcaagctcaataattaattaggagtaaatctggcttcgaatttttaaattgtcaacttccaaagaaggattggcaagactcaatctcaattgcccaacaaacatatggctctttacaaatttggaatctctttttgatggcaagaacgtcgtaattcctctgtcgatctcatgtaattaccaaactcatctacttattactttctttatatgcacttactgatgcggccgcttaattaagatgagtgatactcaggactcaggactcactctgctgatcactagtgctagcctcgaggtcgacacaactttgtatacaaaagttgtctagacctaggctcagcaactcatccagtcaagttcgagtcagtgagttgggcggccgcagcttatagtaaagatttttttgttaataaaatgaaagttaatatttatggatttatttgaacatatttacaagtttttgttaataaatttatttacagaagtgttaaatttgaaaatgtgttaaatgagagttaatatttatggatataatattactttatttaaaaataaaatgaatttatattaaaatatgatttggtaaaagatattataaagaggaacttggatgagaaagacgacgatgggcaaaagttgcatggcacaccgcttttgttcagtaacatctgcactgtggcgcctttttcacactcaccatgcatgctgccacgtcagctttcacactatgacaccactggccatacacgttgccacctcagctttctcctcttctcactatgacacgactggccatgcatgcatgcatgctgccacctcagctcccgcctcttcacccgtgtctttctctcatgtcgcagtgctgcgtgccaacctcttctctctataaatagagagaagagaatgatggttaaactcaaaccaaaacaagaaaacatacacaaatagcaaaacggatccacaaccaaaaatggcttcctctatgctctcttccgctactatggttgcctctccggctcaggccactatggtcgctcctttcaacggacttaagtcctccgctgccttcccagccacccgcaaggctaacaacgacattacttccatcacaagcaacggcggaagagttaactgcatgcaggtgtggcctccgattggaaagaagaagtttgagactctctcttaccttcctgaccttaccgattccgaagctgcaaggaacgtgagtgcggctcatgagatgcatgacgagaagaggatagctgttgtgggcatggctgttcagtatgctggatgcaaaacgaaagacgagttctgggaagttctcatgaatggaaaagttgagagcaaagtgatcagcgacaaacgtcttggttcaaattaccgtgctgaacactacaaagctgaaaggagcaagtatgctgacaccttctgcaatgagacatatggaactcttgatgagaacgaaatagacaatgagcatgaactccttttgaaccttgccaaacaagccttggctgaaacatctgtcaaagattcaacaagatgtggcatagtttctggatgcctcagcttcccgatggacaacctccaaggtgaactcttgaatgtgtaccagaaccatgttgagaagaaacttggtgccagagttttcaaagatgcctctcactggtcagaaagagaacagtccaacaaaccagaggctggtgacagaagaatcttcatggaccctgcttcctttgttgctgaggaactcaatcttggcgctctccactactctgttgatgctgcctgtgccactgcgctctatgtgctcagactggcgcaagatcacttggtctctggtgcagctgatgtgatgctttgtggtgcaacatgcctgccggagccgtttttcatactctctgggttctcaaccttccaagccatgcctgttggaacgggtcagaatgtgtccatgccgctgcacaaagattctcaaggattgacccctggtgaaggaggttccatcatggtcctcaaacgtttggatgacgcaatcagagatggagatcacatctatggaacacttttgggagccaatgtcagcaacagtggcactggtctgccacttaaaccccttttgccgtcagagaaaaagtgcctcatggacacctacacacgtatcaatgtgcatccccacaagattcagtatgttgaatgccatgcaactgggactccacaaggtgatcgtgtggaaattgatgctgtgaaggcttgctttgaaggcaaagtcccacgttttggaaccacaaaagggaactttggacacacattggtggcagctgggtttgctggcatgtgcaaagtgcttctctccatgaagcacgggatcattccacccactccgggaatagatgacgaaacgaagatggaccctctggttgtctctggtgaggccattccctggccagaaacgaatggagaaccgaagcgtgctggtctctcagcgtttggatttggtgggaccaatgctcatgctgtctttgaggaacatgacccaagcaatgctgcatgcactggccatgactccatttctgctctctctgcacgttgtggtggtgagtcaaacatgagaatagcaatcactgggatggatgccacttttggtgctttgaaaggattggatgcttttgaaagggccatctacactggtgctcatggtgctataccactcccagaaaagagatggagattcctggggaaagacaaggacttccttgatctttgtggagtcaaagcaacaccgcatggctgttacattgaagatgttgaagttgatttccagaggctgaggactccaatgactcctgaagatatgctcttgcctcaacagcttctggctgtcaccacaattgatagggccatattggactctggcatgaagaaaggtggaaatgtggctgtctttgtggggttggggaccgatcttgaactctaccgtcaccgtgcaagggttgctctcaaggagagagtgaggcctgaagccagcaagaaactcaatgacatgatgcagtacatcaatgattgtgggacaagcacttcttacaccagctacataggcaacttggttgcaacaagggtcagttcacaatggggcttcacgggaccttccttcacaatcacagaaggcaacaattctgtgtacagatgtgctgaacttggcaaatacctcttggaaacgggagaggttgatggggttgtggttgcgggtgttgatctctgtgggagtgctgagaacctttacgtcaagtcaaggcgtttcaaggtgtctacatctgacaccccgagagccagctttgatgcagctgctgatggttactttgttggagagggctgtggtgcatttgtgctcaagcgtgagacaagctgcaccaaggatgacagaatctatgcttgcatggatgccatagttcctggaaatgttccatctgcatgtttgagagaggcattggatcaagccagagtcaagcctggagacatcgagatgttggagctttctgctgattcagcgaggcatttgaaggacccgtctgttctcccaaaggaactcactgctgaggaagagattggcggacttcagacgattcttcgtgacgatgacaagctcccaaggaatgttgcaactggaagtgtcaaggccactgttggtgacactggttatgcttctggtgctgccagtttgattaaggctgcgctttgcatctacaaccgttacctgcccagcaatggagatgactgggatgaacctgcacctgaagcaccctgggacagcacactctttgcgtgccagacctcaagagcttggttgaagaaccctggtgagagacgttatgcggctgtttccggagtcagtgaaaccagaagttgctacagtgtgctgctttctgaagcagagggacactacgagagagagaacagaatcagtttggatgaggaagcacccaagctcattgtgttgagagcagactcccatgaagagattcttggaagattggacaagataagggaaaggttcttgcagcccacgggtgctgcacccagagagtctgaattgaaggcgcaagcccgtaggatctttcttgaactccttggtgagacccttgcccaagatgcagcttcatctggaagtcagaagccccttgctctcagcttggtctccactccatccaagctccagagagaggtggaacttgcggcaaaaggcattccgagatgtctcaagatgagacgtgattggagttcccctgctggaagcagatatgcgcctgagcctttggccagtgacagagttgccttcatgtatggagaaggaaggagcccttactatggcatcacacaagacattcataggatttggcctgaacttcatgaggtcatcaatgagaaaacaaaccgtctctgggctgaaggtgacagatgggtcatgccaagggccagcttcaagagtgagcttgagtcacaacagcaagagtttgacagaaacatgattgaaatgttccgtcttggaatcctcacctcaattgccttcacaaacctggcgagagatgttctcaacatcacgcccaaagcagcctttggactcagtttgggagagatttccatgatctttgctttctccaagaaaaacggtttgataagcgatcagttgacaaaggatttgagagagtcagatgtctggaacaaagctctggctgttgagttcaatgcgctcagagaagcctggggcattccacagtctgtcccaaaagatgagttctggcaaggttacatagtgaggggaacgaaacaagacatagaagcagccatagcaccagactcaaagtatgtgaggttgaccatcatcaatgatgccaacactgctctcatcagtggaaagcctgatgcatgcaaagctgcgattgctcgtcttggtggcaacatccctgcgcttccagtcactcaaggcatgtgtgggcattgcccagaggtgggaccttacaccaaggacatcgcaaagatccacgccaaccttgagttccctgtggttgatggtcttgatctctggactaccataaaccagaagaggcttgtgccaagagccacgggtgccaaagatgaatgggctccttcatcctttggggagtatgctggacagctctatgagaaacaagccaacttccctcagatagttgaaaccatctacaagcagaactatgatgtgtttgttgaagttgggccaaacaatcacagaagcacagcagtgagaaccacgcttggaccacagagaaaccaccttgctggtgccatagacaagcagaacgaggatgcttggacgacaatagtcaagctcgtggcttcattgaaggctcaccttgttcctggagtgaccatcagtccgctctaccactccaagctcgttgcagaggctgaggcttgttatgctgcgctctgtaaaggtgagaaacccaagaaaaacaagtttgtgagaaagattcagttgaatggcagattcaacagcaaggcagaccccatctcctcagcagaccttgcatccttcccacctgcggaccctgcgattgaagctgccatctcttcaaggatcatgaagcctgtggctccgaaattctatgcgcgtctcaacattgatgagcaagatgagaccagagatccgatcttgaacaaggacaatgcgccttccagctccagctcttccagcagttcctcttccagcagttcatctccgtctcctgctccttcagctccagttcagaagaaagctgccccagctgcggagacaaaagctgttgccagtgctgatgcacttcgtagtgccctgcttgatcttgactccatgcttgcgctcagctctgcaagtgcttctggcaaccttgttgagactgcgccatctgatgccagtgtcattgtccctccgtgcaacattgctgatcttggcagcagagctttcatgaaaacttatggtgtttctgcgcctctgtacaccggtgcaatggccaagggaattgcctctgcggacttggtgatcgcagctggaaggcaaggaatccttgcgtcatttggtgctggaggccttccaatgcaagttgtgcgtgagtccattgaaaagattcaagctgccctgcccaatggaccatatgctgtcaacctcatccattctccttttgacagcaaccttgagaagggaaatgttgatctcttcttggaaaagggtgtcacttttgttgaggcttcagccttcatgacgttgacaccgcaagttgtcagatacagagcggctgggttgacgaggaatgcagatgggtcagtcaacataaggaacagaatcattgggaaagtctccagaactgagctggctgaaatgttcatgcgtcctgcacctgagcatcttttgcagaagctcattgcttctggggagatcaatcaagaacaagctgagttggccagacgtgttcctgtggctgatgacattgcggttgaagctgattctggtggacacactgacaaccgtccaatccatgtcattctgcctctgattatcaacctgagggataggcttcacagagagtgtggatacccagcaaacctgagggttcgtgttggtgctgggggtggcattgggtgtccccaagctgcgctggcaactttcaacatgggtgcctctttcattgtcactggaacagtgaaccaagttgccaaacaatctgggacgtgtgacaatgtgaggaaacagcttgcgaaagcaacttactcagatgtttgcatggcaccggcagctgacatgtttgaggaaggtgtgaaacttcaagttttgaagaaaggaacaatgttcccttcaagagccaacaaactctatgagttgttctgcaagtatgattcttttgagtccatgcctccagcagagcttgcgagggttgagaaaagaatcttcagtcgtgcattggaagaggtctgggatgagaccaagaacttctacatcaaccgtctccacaacccagagaagatacagagggctgagagggaccccaaactgaagatgtcactgtgtttcagatggtatctgtccctggcttcaaggtgggccaacactggagcttctgacagagtcatggactaccaagtttggtgtggtcctgccattggttcattcaatgatttcatcaaaggaacttaccttgatccggcagtggcaaatgagtacccgtgtgttgtgcagatcaacaaacagattcttagaggagcgtgcttcttgaggcgtcttgaaatactgagaaatgcaaggctttcagatggtgcagctgcacttgtggcgagcattgatgacacatatgtccctgctgagaagctgtgagtagttagcttaatcacttaggtcacccagtccaagcccggcctagcacgatgatcatgagtgttgctattgatgtatgttaatactatacacagtcatcgtgtgtgttttataaaactgtaagcttaggatgtttgaggctaatgtaattagcactacaccgtaataaatgagaggtttactttatgttttaataatgttcttacccttgctgctctctaaactgtaatggcgtacggttagctaaactaaagtaaaaatcgattcgcttgagtaaaattagtgaccgggaaagatcatcgactactactgctcagagatgtaatcggtaattaagacttcaagctcaataattaattaggagtaaatctggcttcgaatttttaaattgtcaacttccaaagaaggattggcaagactcaatctcaattgcccaacaaacatatggctctttacaaatttggaatctctttttgatggcaagaacgtcgtaattcctctgtcgatctcatgtaattaccaaactcatctacttattactttctttatatgcacttactgatgcggccgcttaattaatctgacctgaccactagacctgagtgagtacagatgtgctactagtgctagcctcgaggtcgaccaacttttctatacaaagttgtctagacctaggactaggcactgagtgactcactgacctgactgagtgactggcggccgcagcttatagtaaagatttttttgttaataaaatgaaagttaatatttatggatttatttgaacatatttacaagtttttgttaataaatttatttacagaagtgttaaatttgaaaatgtgttaaatgagagttaatatttatggatataatattactttatttaaaaataaaatgaatttatattaaaatatgatttggtaaaagatattataaagaggaacttggatgagaaagacgacgatgggcaaaagttgcatggcacaccgcttttgttcagtaacatctgcactgtggcgcctttttcacactcaccatgcatgctgccacgtcagctttcacactatgacaccactggccatacacgttgccacctcagctttctcctcttctcactatgacacgactggccatgcatgcatgcatgctgccacctcagctcccgcctcttcacccgtgtctttctctcatgtcgcagtgctgcgtgccaacctcttctctctataaatagagagaagagaatgatggttaaactcaaaccaaaacaagaaaacatacacaaatagcaaaacggatccacaaccaaaaatggcttcctctatgctctcttccgctactatggttgcctctccggctcaggccactatggtcgctcctttcaacggacttaagtcctccgctgccttcccagccacccgcaaggctaacaacgacattacttccatcacaagcaacggcggaagagttaactgcatgcaggtgtggcctccgattggaaagaagaagtttgagactctctcttaccttcctgaccttaccgattccgaagcgcttcgtgtcaagaccaacaagaagccatgttgggagatgaccaaggaggaactgacctctggcaaaactgaggtgttcaactatgaggaactcctggagtttgcagagggtgacatagctaaggtttttggtccggagtttgctgtcatagacaagtaccccagaagggtgaggctgcctgctcgtgaatacctgcttgtgacaagggtcacactcatggatgccgaggtcaacaactacagagttggtgccagaatggtcactgagtatgatcttccagtgaatggcgaattgtctgagggaggtgattgtccctgggcagttctggttgagagtggacagtgcgatttgatgctgatatcatacatgggaattgatttccagaaccaaggtgacagagtttaccgtctgctcaacaccacgttgacattctatggggttgcccatgagggagagacccttgagtatgacatcagagtgaccggttttgccaaacgtttggatggtggcatctccatgttcttctttgagtatgactgctatgtcaatgggaggcttctcattgagatgagagatggctgtgctggcttcttcacaaatgaggagcttgatgcgggaaagggtgtggtgttcacaagaggggatttggctgccagagctaagattccaaagcaagatgtttctccctatgctgtcgctccctgccttcacaaaacaaaactcaacgaaaaggagatgcagaccttggttgacaaagattgggcttccgtttttggctcaaagaatggcatgccggagatcaactacaaactctgcgcacgtaagatgctcatgattgatagagtcaccagcattgaccataagggaggtgtgtacggtttgggtcagttggttggtgagaaaatcttggagagggaccattggtacttcccatgccattttgttaaggatcaagtcatggctggatctcttgtcagcgacggttgttcacaaatgctcaagatgtacatgatctggctcggtttgcaccttaccaccggaccatttgacttcagacccgtcaacggacacccgaacaaagttaggtgtaggggtcagatatctcctcataagggaaagttggtctacgtcatggagatcaaagagatgggattcgacgaggataacgatccgtacgccattgctgacgtcaacatcattgacgttgatttcgaaaagggtcaagatttcagccttgatagaatcagcgactacggaaagggggatcttaacaaaaagatcgtcgtggacttcaagggcattgctctcaagatgcagaagagatccacgaacaagaacccctccaaagttcagcccgtttttgctaacggtgcagccactgtgggaccggaagcgtccaaggccagctctggtgccagtgctagtgcttctgctgcccctgcgaagcctgctttctcagcagatgttcttgcgccaaagccagttgcacttcctgaacatatcctcaagggtgacgctctcgctccgaaagaaatgtcctggcatcccatgtcaaaacttcctggcaacccgacgccgttcttctcccctagttcttaccctccgagggcaatttgcttcatccctttccctggcaacccacttgacaacaattgcaaagctggagaaatgcctctgaactggtacaacatgtcagagttcatgtgtggaaaagttagcaactgcttgggaccagagttcgcaagatttgataagtcaaatacgagcagaagccctgcttttgatttggctcttgtgactagagttgttgaagtcacaaacatggaacatggcaagttcctgaatgttgattgcaatcccagcaaaggcacaatggtgggggagtttgactgtcctcaagatgcgtggttctttgatggttcttgcaatgatgggcacatgccttattccatcatcatggaaatcggacttcagacatccggtgttctcaccagtgtgttgaaagcaccactgacgatggacaaagatgacattctctttaggaaccttgatgcaagtgctgaaatggtgaggccagatgtggatgtgagggggaaaaccataaggaatgtgaccaagtgcactggatatgcaatgttgggaaagatggggattcacagattcacgtttgagttgtctgttgatggcgtggttttctacaaaggaagcacttcctttggatggttcactccagaggtgtttgctcagcaagctggacttgacaatgggaaaaagacggagccttggtgcaaaactaacaacacgagtgtgagaagagttgaaatcgcatcagccaaaggcaaagaacagctgactgagaaacttccagatgcaactaatgctcaagttctcagaaggtcagaacagtgtgagtatttggattacctcaacattgctcctgattctgggctgcatgggaaaggatatgcgcatggacacaaagatgttaacccacaagactggttcttctcttgtcacttttggtttgatcctgtgatgcctggatctttgggaattgagtcaatgttccagctcattgaggcatttgcggtggaccagaacataccgggagaatacaatgtgagcaatccgacctttgcccatgcccctggaaaaacggcgtggaagtaccgtggtcaattgacaccaaagaaccgtgcgatggactgtgaggtgcacatagtttcaatcacagcctctcctgaaaatggaggctacgttgacatagtggcagatggagcactttgggttgatggtctccgtgtgtatgaagccaaagaactcagagttcgtgttgtcagtgcaaaacctcaagccattccggatgttcaacaacagccacccagcgcaaaagcggaccctgggaaaactggagttgcactcagtccgactcagttgagagatgtcctgcttgaagtggacaatccattgtatcttggtgttgaaaactccaatttggtgcagtttgaatccaaacctgcaacttcttcaaggattgtcagtatcaaaccatgctccataagtgatcttggtgacaagtccttcatggaaacgtacaatgtgtcagcacctctgtacactggagcaatggccaagggaattgcgtctgcggaccttgtcattgctgctgggaagaggaagatattgggttcttttggagcgggtgggcttccaatgcaccatgtgagggcagctttggagaagatacaagcggctctgcctcaaggaccatatgctgtgaacctcattcattcaccttttgacagcaacttggaaaaggggaatgttgatctcttcctcgaaaagggcgttactgtggtggaggcttctgcattcatgaccctcactccccaagttgttcgttaccgtgcagccggactctcaaggaacgctgatgggagtgtcaacatcagaaaccgtatcattggaaaagtgtccagaacagaactcgccgaaatgttcatcagaccggctccggaacacctccttgagaaactcatagcttctggtgagataacacaagaacaagccgaacttgcccgtcgtgttcctgtcgcagacgacatcgctgttgaagctgattctggtggtcacactgacaaccgtcccatccacgtcatcttgcctttgatcatcaaccttaggaacagactgcacagagagtgtggttatcctgcgcaccttagagtcagagttggagctggaggcggtgttggctgcccacaagctgctgcggctgccctcacaatgggagctgccttcatagtgactgggactgtcaatcaagttgctaaacagtccgggacatgtgacaacgtgagaaaacaactcagtcaagccacctacagtgacatttgcatggctccagcagctgatatgtttgaggaaggtgtgaaactccaagttctcaagaagggaacaatgttcccatcaagagctaacaaattgtacgaactcttttgcaagtacgactctttcgattcaatgcctcctgctgaacttgaaaggatcgagaagaggatcttcaagagggcacttcaagaggtctgggaagagaccaaggacttttacatcaatggtttgaagaatccagagaagatacagagagcggaacatgaccccaaactcaagatgtctttgtgtttcagatggtatcttggtcttgcatcacgttgggccaacatgggtgctcctgatcgtgtcatggactatcaagtctggtgtggtccagccattggagccttcaatgacttcatcaaaggaacatatcttgatcctgctgtctctaatgagtacccatgtgttgtccagatcaaccttcagattttgcgtggtgcatgttacctgaggcgtcttaatgctctgagaaatgatccgaggattgatcttgagactgaagatgctgcctttgtctatgagccaacgaatgcgctttgagtagttagcttaatcacttaggtcacccagtccaagcccggcctagcacgatgatcatgagtgttgctattgatgtatgttaatactatacacagtcatcgtgtgtgttttataaaactgtaagcttaggatgtttgaggctaatgtaattagcactacaccgtaataaatgagaggtttactttatgttttaataatgttcttacccttgctgctctctaaactgtaatggcgtacggttagctaaactaaagtaaaaatcgattcgcttgagtaaaattagtgaccgggaaagatcatcgactactactgctcagagatgtaatcggtaattaagacttcaagctcaataattaattaggagtaaatctggcttcgaatttttaaattgtcaacttccaaagaaggattggcaagactcaatctcaattgcccaacaaacatatggctctttacaaatttggaatctctttttgatggcaagaacgtcgtaattcctctgtcgatctcatgtaattaccaaactcatctacttattactttctttatatgcacttactgatgcggccgcttaattaatcacgagtggatgactgtcacgactgactcatgactgactactagtgctagcctcgaggtcgacacaactttgtataataaagttgtctagacctaggagctgtgctgggtaactcacatgagtcactggtcacatcagcggccgcagcttatagtaaagatttttttgttaataaaatgaaagttaatatttatggatttatttgaacatatttacaagtttttgttaataaatttatttacagaagtgttaaatttgaaaatgtgttaaatgagagttaatatttatggatataatattactttatttaaaaataaaatgaatttatattaaaatatgatttggtaaaagatattataaagaggaacttggatgagaaagacgacgatgggcaaaagttgcatggcacaccgcttttgttcagtaacatctgcactgtggcgcctttttcacactcaccatgcatgctgccacgtcagctttcacactatgacaccactggccatacacgttgccacctcagctttctcctcttctcactatgacacgactggccatgcatgcatgcatgctgccacctcagctcccgcctcttcacccgtgtctttctctcatgtcgcagtgctgcgtgccaacctcttctctctataaatagagagaagagaatgatggttaaactcaaaccaaaacaagaaaacatacacaaatagcaaaacggatccacaaccaaaaatggcttcctctatgctctcttccgctactatggttgcctctccggctcaggccactatggtcgctcctttcaacggacttaagtcctccgctgccttcccagccacccgcaaggctaacaacgacattacttccatcacaagcaacggcggaagagttaactgcatgcaggtgtggcctccgattggaaagaagaagtttgagactctctcttaccttcctgaccttaccgattccgaacttcagcacacttggcttccgaagcctcccaatctgaccctcttgtcagatgaggttcatctctggaggattcctcttgaccagcctgagtcacaacttcaagaccttgctgccaccctgagcagtgatgaattggcgagggcaaacagattctactttccagaacacagaaggcgtttcactgctgggagaggcatcctcagatccatcttgggtggatacttgggagtggaaccgggtcaagtcaagtttgattatgagtcccgtgggaaaccgatccttggtgacagatttgctgagagtggactcctgttcaacttgtctcacagccagaaccttgccttgtgtgctgtcaactacacgcgtcaaataggcattgatcttgaatatctgcgtccaacatctgacttggagtctcttgcaaagaggttctttctcccaagagaatatgaactcttgaggtcactccctgatgagcagaaacagaagattttctttcgttactggacttgcaaagaggcttatctcaaagcaacgggagatggaatagccaaacttgaagagatcgagatagcactcaccccaacagaacctgccaagctccaaacagctcctgcgtggtctctgttggagcttgtgccagatgacaattgtgttgcagctgtggctgttgcgggttttggttggcagcccaagttctggcattactgagtagttagcttaatcacttaggtcacccagtccaagcccggcctagcacgatgatcatgagtgttgctattgatgtatgttaatactatacacagtcatcgtgtgtgttttataaaactgtaagcttaggatgtttgaggctaatgtaattagcactacaccgtaataaatgagaggtttactttatgttttaataatgttcttacccttgctgctctctaaactgtaatggcgtacggttagctaaactaaagtaaaaatcgattcgcttgagtaaaattagtgaccgggaaagatcatcgactactactgctcagagatgtaatcggtaattaagacttcaagctcaataattaattaggagtaaatctggcttcgaatttttaaattgtcaacttccaaagaaggattggcaagactcaatctcaattgcccaacaaacatatggctctttacaaatttggaatctctttttgatggcaagaacgtcgtaattcctctgtcgatctcatgtaattaccaaactcatctacttattactttctttatatgcacttactgatgcggccgcttaattaactactgtcactgaggccgtagacgagtacggactgatctaactagtgctagcctcgaggtcgacacccagctttc

SEQ ID NO: 37 - DNA, 39183 bp, Artificial sequence
  plasmid pDAB100518
ttgtacaaagtggttgcggccgcttaattaaatttaaattcaattaatgcaatcttgattttcaacaacgaaggtaatggcgtaaaagaaaaaatgtatgttattgtattgatctttcatgatgttgaagcgtgccataatatgatgatgtataattaaaatattaactgtcgcattttattgaaatggcactgttatttcaaccatatctttgattctgttacatgacacgactgcaagaagtaaataatagacgccgttgttaaagaattgctatcatatgtgcctaactagagggaatttgagcgtcagacctaatcaaatattacaaaatatctcactctgtcgccagcaatggtgtaatcagcgcagacaaatggcgtaaagatcgcggaaaaacctccccgagtggcatgatagctgcctctgtattgctgatttagtcagccttatttgacttaagggtgccctcgttagtgacaaattgctttcaaggagacagccatgccccacactttgttgaaaaacaaattgcctttggggagacggtaaagccagttgctcttcaataaggaatgtcgaggaggcaatgtaaccgcctctggtagtacacttctctaatccaaaaatcaatttgtattcaagataccgcaaaaaacttatggtttaaaccctgcaggactagtccagaaggtaattatccaagatgtagcatcaagaatccaatgtttacgggaaaaactatggaagtattatgtaagctcagcaagaagcagatcaatatgcggcacatatgcaacctatgttcaaaaatgaagaatgtacagatacaagatcctatactgccagaatacgaagaagaatacgtagaaattgaaaaagaagaaccaggcgaagaaaagaatcttgaagacgtaagcactgacgacaacaatgaaaagaagaagataaggtcggtgattgtgaaagagacatagaggacacatgtaaggtggaaaatgtaagggcggaaagtaaccttatcacaaaggaatcttatcccccactacttatccttttatatttttccgtgtcatttttgcccttgagttttcctatataaggaaccaagttcggcatttgtgaaaacaagaaaaaatttggtgtaagctattttctttgaagtactgaggatacaacttcagagaaatttgtaagtttgtaggtaccagatctggatcccaaaccatgtctccggagaggagaccagttgagattaggccagctacagcagctgatatggccgcggtttgtgatatcgttaaccattacattgagacgtctacagtgaactttaggacagagccacaaacaccacaagagtggattgatgatctagagaggttgcaagatagatacccttggttggttgctgaggttgagggtgttgtggctggtattgcttacgctgggccctggaaggctaggaacgcttacgattggacagttgagagtactgtttacgtgtcacataggcatcaaaggttgggcctaggatctacattgtacacacatttgcttaagtctatggaggcgcaaggttttaagtctgtggttgctgttataggccttccaaacgatccatctgttaggttgcatgaggctttgggatacacagcccggggtacattgcgcgcagctggatacaagcatggtggatggcatgatgttggtttttggcaaagggattttgagttgccagctcctccaaggccagttaggccagttacccaaatctgagtagttagcttaatcacctagagctcgatcggcggcaatagcttcttagcgccatcccgggttgatcctatctgtgttgaaatagttgcggtgggcaaggctctctttcagaaagacaggcggccaaaggaacccaaggtgaggtgggctatggctctcagttccttgtggaagcgcttggtctaaggtgcagaggtgttagcgggatgaagcaaaagtgtccgattgtaacaagatatgttgatcctacgtaaggatattaaagtatgtattcatcactaatataatcagtgtattccaatatgtactacgatttccaatgtctttattgtcgccgtatgtaatcggcgtcacaaaataatccccggtgactttcttttaatccaggatgaaataatatgttattataatttttgcgatttggtccgttataggaattgaagtgtgcttgaggtcggtcgccaccactcccatttcataattttacatgtatttgaaaaataaaaatttatggtattcaatttaaacacgtatacttgtaaagaatgatatcttgaaagaaatatagtttaaatatttattgataaaataacaagtcaggtattatagtccaagcaaaaacataaatttattgatgcaagtttaaattcagaaatatttcaataactgattatatcagctggtacattgccgtagatgaaagactgagtgcgatattatggtgtaatacataggaattcgtttaaacgatctgcgtctaattttcggtccaacttgcacaggaaagacgtcgaccgcggtagctcttgcccagcagactgggcttccagtcctttcgctcgatcgggtccaatgttgtcctcagctgtgaaccggaagcggacgaccaacagtggaagaactgaaaggaacgagccgtctataccttgatgatcggcctctggtgaagggtatcatcgcagccaagcaagctcatgaaaggctgatgggggaggtgtataattatgaggcccacggcgggcttattctttagggaggatctatctcgttgctcaagtgcatggcgcaaagcagttattggagtgcggattttcgttggcatattattcgccacgagttagcagacgaagagaccttcatgaacgtggccaaggccagagttaagcagatgttacgccctgctgcaggcctttctattatccaatagttggttgatctttggaaagagcctcggctgaggcccatactgaaagagatcgatggatatcgatatgccatgttgtttgctagccagaaccagatcacatccgatatgctattgcagcttgacgcagatatggaggataagttgattcatgggatcgctcaggagtagctcatccatgcacgccgacaagaacagaaattccgtcgagttaacgcagccgcttacgacggattcgaaggtcatccattcggaatgtattagtttgcaccagctccgcgtcacacctgtcttcatttgaataagatgttagcaattgtttttagctttgtcttgttgtggcagggcggcaagtgcttcagacatcattctgttttcaaattttatgctggagaacagcttcttaattcctttggaaataatagactgcgtcttaaaattcagatgtctggatatagatatgattgtaaaataacctatttaagtgtcatttagaacataagttttatgaatgttcttccattttcgtcatcgaacgaataagagtaaatacaccttttttaacattacaaataagttcttatacgttgtttatacaccgggaatcatttccattattttcgcgcaaaagtcacggatattcgtgaaagcgacataaactgcgaaatttgcggggagtgtcttgagtttgcctcgaggctagcgcatgcacatagacacacacatcatctcattgatgcttggtaataattgtcattagattgtttttatgcatagatgcactcgaaatcagccaattttagacaagtatcaaacggatgtgacttcagtacattaaaaacgtccgcaatgtgttattaagttgtctaagcgtcaatttgatttacaattgaatatatcctgccccagccagccaacagctcgatttacaattgaatatatcctgccggccggcccacgcgtgtcgaggaattctgatctggcccccatttggacgtgaatgtagacacgtcgaaataaagatttccgaattagaataatttgtttattgctttcgcctataaatacgacggatcgtaatttgtcgttttatcaaaatgtactttcattttataataacgctgcggacatctacatttttgaattgaaaaaaaattggtaattactctttctttttctccatattgaccatcatactcattgctgatccatgtagatttcccggacatgaagccatttacaattgaatatatcctgccgccgctgccgctttgcacccggtggagcttgcatgttggtttctacgcagaactgagccggttaggcagataatttccattgagaactgagccatgtgcaccttccccccaacacggtgagcgacggggcaacggagtgatccacatgggacttttaaacatcatccgtcggatggcgttgcgagagaagcagtcgatccgtgagatcagccgacgcaccgggcaggcgcgcaacacgatcgcaaagtatttgaacgcaggtacaatcgagccgacgttcacgcggaacgaccaagcaagcttggctgccatttttggggtgaggccgttcgcggccgaggggcgcagcccctggggggatgggaggcccgcgttagcgggccgggagggttcgagaagggggggcaccccccttcggcgtgcgcggtcacgcgcacagggcgcagccctggttaaaaacaaggtttataaatattggtttaaaagcaggttaaaagacaggttagcggtggccgaaaaacgggcggaaacccttgcaaatgctggattttctgcctgtggacagcccctcaaatgtcaataggtgcgcccctcatctgtcagcactctgcccctcaagtgtcaaggatcgcgcccctcatctgtcagtagtcgcgcccctcaagtgtcaataccgcagggcacttatccccaggcttgtccacatcatctgtgggaaactcgcgtaaaatcaggcgttttcgccgatttgcgaggctggccagctccacgtcgccggccgaaatcgagcctgcccctcatctgtcaacgccgcgccgggtgagtcggcccctcaagtgtcaacgtccgcccctcatctgtcagtgagggccaagttttccgcgaggtatccacaacgccggcggccgcggtgtctcgcacacggcttcgacggcgtttctggcgcgtttgcagggccatagacggccgccagcccagcggcgagggcaaccagcccggtgagcgtcggaaagggtcgacggatcttttccgctgcataaccctgcttcggggtcattatagcgattttttcggtatatccatcctttttcgcacgatatacaggattttgccaaagggttcgtgtagactttccttggtgtatccaacggcgtcagccgggcaggataggtgaagtaggcccacccgcgagcgggtgttccttcttcactgtcccttattcgcacctggcggtgctcaacgggaatcctgctctgcgaggctggccggctaccgccggcgtaacagatgagggcaagcggatggctgatgaaaccaagccaaccaggaagggcagcccacctatcaaggtgtactgccttccagacgaacgaagagcgattgaggaaaaggcggcggcggccggcatgagcctgtcggcctacctgctggccgtcggccagggctacaaaatcacgggcgtcgtggactatgagcacgtccgcgagctggcccgcatcaatggcgacctgggccgcctgggcggcctgctgaaactctggctcaccgacgacccgcgcacggcgcggttcggtgatgccacgatcctcgccctgctggcgaagatcgaagagaagcaggacgagcttggcaaggtcatgatgggcgtggtccgcccgagggcagagccatgacttttttagccgctaaaacggccggggggtgcgcgtgattgccaagcacgtccccatgcgctccatcaagaagagcgacttcgcggagctggtattcgtgcagggcaagattcggaataccaagtacgagaaggacggccagacggtctacgggaccgacttcattgccgataaggtggattatctggacaccaaggcaccaggcgggtcaaatcaggaataagggcacattgccccggcgtgagtcggggcaatcccgcaaggagggtgaatgaatcggacgtttgaccggaaggcatacaggcaagaactgatcgacgcggggttttccgccgaggatgccgaaaccatcgcaagccgcaccgtcatgcgtgcgccccgcgaaaccttccagtccgtcggctcgatggtccagcaagctacggccaagatcgagcgcgacagcgtgcaactggctccccctgccctgcccgcgccatcggccgccgtggagcgttcgcgtcgtctcgaacaggaggcggcaggtttggcgaagtcgatgaccatcgacacgcgaggaactatgacgaccaagaagcgaaaaaccgccggcgaggacctggcaaaacaggtcagcgaggccaagcaggccgcgttgctgaaacacacgaagcagcagatcaaggaaatgcagctttccttgttcgatattgcgccgtggccggacacgatgcgagcgatgccaaacgacacggcccgctctgccctgttcaccacgcgcaacaagaaaatcccgcgcgaggcgctgcaaaacaaggtcattttccacgtcaacaaggacgtgaagatcacctacaccggcgtcgagctgcgggccgacgatgacgaactggtgtggcagcaggtgttggagtacgcgaagcgcacccctatcggcgagccgatcaccttcacgttctacgagctttgccaggacctgggctggtcgatcaatggccggtattacacgaaggccgaggaatgcctgtcgcgcctacaggcgacggcgatgggcttcacgtccgaccgcgttgggcacctggaatcggtgtcgctgctgcaccgcttccgcgtcctggaccgtggcaagaaaacgtcccgttgccaggtcctgatcgacgaggaaatcgtcgtgctgtttgctggcgaccactacacgaaattcatatgggagaagtaccgcaagctgtcgccgacggcccgacggatgttcgactatttcagctcgcaccgggagccgtacccgctcaagctggaaaccttccgcctcatgtgcggatcggattccacccgcgtgaagaagtggcgcgagcaggtcggcgaagcctgcgaagagttgcgaggcagcggcctggtggaacacgcctgggtcaatgatgacctggtgcattgcaaacgctagggccttgtggggtcagttccggctgggggttcagcagccagcgctttactggcatttcaggaacaagcgggcactgctcgacgcacttgcttcgctcagtatcgctcgggacgcacggcgcgctctacgaactgccgataaacagaggattaaaattgacaattgtgattaaggctcagattcgacggcttggagcggccgacgtgcaggatttccgcgagatccgattgtcggccctgaagaaagctccagagatgttcgggtccgtttacgagcacgaggagaaaaagcccatggaggcgttcgctgaacggttgcgagatgccgtggcattcggcgcctacatcgacggcgagatcattgggctgtcggtcttcaaacaggaggacggccccaaggacgctcacaaggcgcatctgtccggcgttttcgtggagcccgaacagcgaggccgaggggtcgccggtatgctgctgcgggcgttgccggcgggtttattgctcgtgatgatcgtccgacagattccaacgggaatctggtggatgcgcatcttcatcctcggcgcacttaatatttcgctattctggagcttgttgtttatttcggtctaccgcctgccgggcggggtcgcggcgacggtaggcgctgtgcagccgctgatggtcgtgttcatctctgccgctctgctaggtagcccgatacgattgatggcggtcctgggggctatttgcggaactgcgggcgtggcgctgttggtgttgacaccaaacgcagcgctagatcctgtcggcgtcgcagcgggcctggcgggggcggtttccatggcgttcggaaccgtgctgacccgcaagtggcaacctcccgtgcctctgctcacctttaccgcctggcaactggcggccggaggacttctgctcgttccagtagctttagtgtttgatccgccaatcccgatgcctacaggaaccaatgttctcggcctggcgtggctcggcctgatcggagcgggtttaacctacttcctttggttccgggggatctcgcgactcgaacctacagttgtttccttactgggctttctcagcccccgagcgcttagtgggaatttgtaccccttatcgaaccgggagcacaggatgacgcctaacaattcattcaagccgacaccgcttcgcggcgcggcttaattcaggagttaaacatcatgagggaagcggtgatcgccgaagtatcgactcaactatcagaggtagttggcgtcatcgagcgccatctcgaaccgacgttgctggccgtacatttgtacggctccgcagtggatggcggcctgaagccacacagtgatattgatttgctggttacggtgaccgtaaggcttgatgaaacaacgcggcgagctttgatcaacgaccttttggaaacttcggcttcccctggagagagcgagattctccgcgctgtagaagtcaccattgttgtgcacgacgacatcattccgtggcgttatccagctaagcgcgaactgcaatttggagaatggcagcgcaatgacattcttgcaggtatcttcgagccagccacgatcgacattgatctggctatcttgctgacaaaagcaagagaacatagcgttgccttggtaggtccagcggcggaggaactctttgatccggttcctgaacaggatctatttgaggcgctaaatgaaaccttaacgctatggaactcgccgcccgactgggctggcgatgagcgaaatgtagtgcttacgttgtcccgcatttggtacagcgcagtaaccggcaaaatcgcgccgaaggatgtcgctgccgactgggcaatggagcgcctgccggcccagtatcagcccgtcatacttgaagctaggcaggcttatcttggacaagaagatcgcttggcctcgcgcgcagatcagttggaagaatttgttcactacgtgaaaggcgagatcaccaaggtagtcggcaaataatgtctaacaattcgttcaagccgacgccgcttcgcggcgcggcttaactcaagcgttagagagctggggaagactatgcgcgatctgttgaaggtggttctaagcctcgtcttgcgatggcatttcgatccattcccattccgcgctcaagatggcttcccctcggcagttcatcagggctaaatcaatctagccgacttgtccggtgaaatgggctgcactccaacagaaacaatcaaacaaacatacacagcgacttattcacacgagctcaaattacaacggtatatatcctgccagtcagcatcatcacaccaaaagttaggcccgaatagtttgaaattagaaagctcgcaattgaggtctacaggccaaattcgctcttagccgtacaatattactcaccggatcctaaccggtttaattaaggcgcgccatgcccgggcaagcggccgcacaagtttgtacaaaaaagcaggcttctagacctaggtggagtcatcacgcagactatctcagcatgtgcgtagcacgcggccgcagcttatagtaaagatttttttgttaataaaatgaaagttaatatttatggatttatttgaacatatttacaagtttttgttaataaatttatttacagaagtgttaaatttgaaaatgtgttaaatgagagttaatatttatggatataatattactttatttaaaaataaaatgaatttatattaaaatatgatttggtaaaagatattataaagaggaacttggatgagaaagacgacgatgggcaaaagttgcatggcacaccgcttttgttcagtaacatctgcactgtggcgcctttttcacactcaccatgcatgctgccacgtcagctttcacactatgacaccactggccatacacgttgccacctcagctttctcctcttctcactatgacacgactggccatgcatgcatgcatgctgccacctcagctcccgcctcttcacccgtgtctttctctcatgtcgcagtgctgcgtgccaacctcttctctctataaatagagagaagagaatgatggttaaactcaaaccaaaacaagaaaacatacacaaatagcaaaacggatccacaaccaaaaatgcttaagctctcttgtaacgttaccaatcatcttcacacattctcattctttagcgattctagtctgttcatccctgtcaacagaaggactcttgctgtgtctatggcagcgaggctgcaagagcagaaaggaggtgagatggacacgaggattgcgatcataggcatgagcgccatacttccttgtggaaccacggtgagagagtcatgggagaccataagggctggcattgattgcctgtctgatcttcctgaggatcgtgttgatgtgactgcgtactttgacccagtcaagaccacaaaggacaaaatctactgcaagagaggaggtttcattcctgagtatgactttgatgcgcgtgagtttggtctcaacatgttccagatggaagattctgatgcgaatcagaccatctcacttctcaaggtcaaagaagcacttcaagatgctgggattgatgcacttggaaaggagaagaaaaacataggatgcgtgcttggcattggaggtggacagaagagttcacatgagttctacagcagactcaactatgtggttgtggagaaagtcttgagaaagatggggatgccagaggaagatgtcaaagtggctgtggagaagtacaaagcgaacttcccagaatggagacttgactctttccctggattccttgggaatgtcactgctggcagatgcaccaacacattcaacttggatggcatgaactgcgttgtggatgctgcatgtgcaagctccttgatagcagtcaaggttgcgattgatgaactgctctatggtgactgcgacatgatggtcactggtgcaacctgcacagacaactccattgggatgtacatggctttctcaaagacacctgtgttcagcacggacccaagtgtgagagcgtatgatgagaaaacgaaagggatgctcattggtgagggatcagccatgttggtgctcaaacgttatgcagatgcagtgagggatggtgatgagattcatgctgtgattcgtggttgtgcaagctcaagtgatggcaaagcagctggcatctacactcccacaatcagtggtcaagaggaagccttgagacgtgcatacaatcgtgcctgcgttgaccctgccactgtcactttggttgagggtcatgggactggcactccagttggagataggattgagttgactgcgttgaggaacttgtttgacaaagcgtatggtgaagggaacacagagaaagttgcagttggaagtatcaagtccagtattggtcatttgaaggctgttgctggtcttgctggaatgatcaaggtcatcatggctctcaaacacaagactttgcctggaacgatcaatgtggacaatccacccaatctctatgacaacactcccatcaatgagtcatccctctacatcaacacgatgaacagaccctggttccctccacctggtgttccgagacgtgctggaatatccagctttggctttggaggtgccaactaccatgcagtgttggaagaggctgaaccagagcacacgacagcgtacagactcaacaaacgtccacaaccggtgttgatgatggctgcaactcctgctgcgttgcagagcctttgtgaagctcagctgaaagagtttgaagctgcgatcaaggagaatgagacagtcaagaatactgcctacatcaagtgtgtcaagtttggagaacagttcaagttccctgggagcatacctgcgaccaatgcgagactgggattcttggtcaaagatgcggaggatgcgtgctccacgcttcgtgctatatgtgctcagtttgccaaagatgtgaccaaagaagcgtggaggcttccgagagaaggagtttctttccgtgccaaaggcattgccaccaatggtgctgttgctgcactcttctctggacaaggtgctcagtacacacacatgttcagtgaagttgcgatgaactggcctcagttcagacagtccattgctgcaatggacgctgcacagtccaaggttgctggaagtgacaaagactttgaaagagtctctcaagtcctgtacccaaggaaaccgtacgaacgtgagccagaacaagatcacaagaaaatctcactcacagcatacagccagccgtcaaccctggcatgtgctcttggtgcctttgagattttcaaggaagctggattcactccagactttgcagctggacacagcttgggtgagtttgctgcgctctatgcagctggttgtgttgacagagatgagttgtttgaacttgtttgcagaagggcaaggatcatgggaggcaaagatgcacctgccacacccaaaggttgcatggcagctgtcataggacccaacgcagagaacatcaaggttcaagctgccaacgtctggcttggaaactcaaactctccgtctcagactgtcattactgggtctgttgaagggattcaagctgaaagtgccagattgcagaaggaagggttcagagttgtgcctcttgcttgtgagtctgccttccattctccacagatggaaaatgccagctcagctttcaaagatgtcatatccaaggtttccttccgtacacccaaagcagaaacaaagctcttcagcaatgtttctggagagacctatccgacggatgccagagagatgctcactcaacacatgacctcatctgtgaagttcctgacccaagtgaggaacatgcaccaagctggtgcgagaatctttgttgagtttggaccgaaacaagttctcagcaaacttgtttctgaaaccctcaaagatgacccgtctgttgtcacagtgtctgtgaacccagcttctggcacggactctgacatacagttgagggatgctgcagttcagctggttgtggctggtgtcaatcttcaagggtttgacaagtgggatgctcctgatgccacgaggatgcaagccatcaagaaaaagagaaccacactcagactttcagctgccacctatgtcagtgacaagaccaagaaagtgagggatgctgccatgaacgacggaagatgtgtcacatacctcaagggtgctgcaccactcatcaaggctcctgaacctgtggttgacgaagctgccaagagggaggctgaaaggcttcagaaggagcttcaagacgctcagaggcagcttgacgacgccaaacgtgcagctgcagaagccaactccaaacttgctgctgccaaggaggaagccaagactgctgcagcttcagccaagcctgcagttgacactgctgttgtggagaaacatcgtgccatcctcaagtccatgctggctgagctggatggttatggaagtgttgatgcttcttcccttcagcaacagcaacagcaacagactgctccggcgcctgttaaagccgctgcccctgccgctcccgttgcaagtgctcctgctcccgccgtgtccaacgagttgcttgagaaagctgagacagttgtgatggaggttctcgctgccaagactggatacgaaacagacatgattgaggcggacatggagcttgagactgagttgggaattgacagcatcaagagggttgaaattctttctgaagtccaagctatgcttaacgttgaggcgaaagatgttgatgctctctctaggacgagaacagtgggtgaagttgtcaacgctatgaaggcagaaatcgctggttcttccgctccggcgccggcagctgccgcacctgcaccggctaaagcggctccagctgcagctgcaccagctgtttctaatgagctgctcgaaaaggcagaaactgttgtgatggaagtccttgctgccaaaactggctacgaaactgacatgatagaatcagacatggagcttgagacggagcttggaattgattccatcaagcgtgtggaaatcctcagtgaagtccaagccatgctcaatgtggaagctaaggatgtggatgctctctcaaggaccagaactgtcggtgaggttgtcaatgccatgaaggctgagatagctggaggctccgctcctgcgccggccgctgccgctcctggtcccgctgccgcggctccagctccagctgcagccgctccggccgtctcaaacgaactccttgaaaaagctgagaccgtcgtgatggaggtcttggcagctaaaaccggctatgagactgacatgattgagtctgacatggaattggagacagaacttgggatagacagcatcaaacgtgttgaaatcctcagtgaggtccaagctatgctgaacgtggaagcgaaggatgttgatgctctgtccagaacgaggaccgttggtgaggttgtggatgccatgaaggctgaaattgctggagggtctgcgcccgcgccagctgcagccgctcctgcacccgcagccgcggcacctgctccagctgcacctgcacctgccgtttcttcagaactcttggagaaggctgagacggttgtgatggaggttttggctgcaaagactggctatgagaccgacatgattgaatctgatatggaattggagacagagcttgggatcgattccatcaaaagagtggagatcctgagtgaagtccaagccatgctcaatgttgaagctaaggatgttgatgcactttcaagaacaaggacagtgggtgaggttgtggatgccatgaaggcggagattgctggagggagcgcgcctgcgccagctgccgcggcacctgcaccggcagccgcagctccagctccagctgcaccagcaccggccgcgcccgcgccagctgtttcatccgaactcctggaaaaggccgagacggttgtgatggaggtgctcgcagctaagactggttacgagaccgacatgattgaaagtgacatggagcttgaaaccgagttgggaatagatagcatcaaacgtgttgaaatcttgtctgaggtccaagctatgttgaacgtggaggcaaaagatgtcgatgcgctttcaagaaccagaacagtcggtgaggtcgtggacgccatgaaggctgaaattgccggaagctctgctagtgcgccagctgcagccgcacctgcacctgctgccgcggcacctgctccagctgcagccgctcctgccgtcagcaatgagttgctggagaaagccgaaacagttgtgatggaagtccttgctgcaaaaactggttacgaaacggacatgattgagtcagacatggaattggagaccgaacttggaatagattccatcaagagagtggagatcctctctgaggtgcaagccatgctcaacgttgaggctaaagatgttgatgcactcagtaggacaagaactgtgggggaagttgtcgatgcgatgaaggctgagattgctggaggctctgctcctgcgccggcagctgccgcacctgcacccgcagccgcggcaccagctgtcagcaacgaattgcttgagaaggctgaaacagttgtcatggaagtgctggctgcaaaaaccggctatgagactgacatgattgagtctgacatggaacttgagacggaattgggcattgacagcatcaagcgtgttgagatcctcagtgaagtccaagcaatgctcaatgtggaggctaaggatgtggatgccctctcaaggaccagaacagttggtgaggtcgttgatgcgatgaaggcggagatcgctggaagttccgcgcctgcgccagctgcagccgctcctgcacccgcagccgcggcaccggctccagctgcagccgcaccggccgtctcctcagaactcctggaaaaggctgagacagttgtgatggaagtccttgctgcgaaaactggctatgagaccgacatgattgaatctgacatggaactggagaccgagcttggaattgactccatcaaacgtgttgaaatcctctctgaggttcaagcgatgttgaatgtggaggccaaagatgttgatgctctttccagaacaaggacggtgggagaggtggttgatgccatgaaggctgagatagctgggggttctgctcctgcgccagctgcagccgctcctgctcccgctgccgcggcaccagctgtcagcaacgaactccttgaaaaagctgaaactgttgtgatggaggttttggctgcaaagactggatacgagactgacatgatagagtcagacatggagttggaaacagagcttgggattgatagcatcaagcgtgtggaaatcctttctgaggttcaagccatgctgaacgttgaggccaaagatgtcgatgctttgtcaaggaccagaacggttggagaagtggtcgatgccatgaaggctgagatagctggtggatcagcccctgctccggctgcagccgctcctgcaagtgccggtgctgcaccagctgtgaagattgattcagttcatggtgctgactgtgacgatttgtcactgatgcacgcaaaggtggttgacatcagaaggccagatgaactgattctggaaagaccggagaaccgtccagttcttgtcgttgacgatggctcagagttgacacttgctcttgtgagggtgttgggagcctgtgcagttgtcttgacctttgagggattgcagttggctcagagagctggtgcagctgccattcgtcatgttctggctaaggacctttcagcagaatcagctgagaaggccatcaaagaggctgagcaaagatttggagcgttgggaggcttcataagccagcaagcagaaaggtttgaaccagctgagatactgggtttcacactcatgtgtgcgaagtttgccaaagcctctctctgcactgctgtggctggaggtcgtcctgccttcatcggtgtggctaggcttgacggcagacttggattcacctctcaaggcacttctgacgcactcaagagagcacagcgtggagcgatctttggactctgcaagacaatagggttggagtggtcagaatctgatgtgttcagccgtggtgtggacattgctcaagggatgcacccagaagatgctgcagttgccatagttagggagatggcgtgtgctgacatcagaatcagagaggttgggattggagcaaaccagcaaagatgcacaatcagagctgccaagttggagactgggaaccctcagagacagatagcgaaagacgatgtgcttctggtttctggaggtgctcgtgggatcacacctctttgcatccgtgagatcacgcgtcagattgctggaggcaagtacattctgttgggtcgtagcaaagtttctgcgtctgaaccagcatggtgtgctggcatcactgatgagaaggctgtgcagaaagctgccacccaagagttgaagagggccttcagtgctggtgaaggacccaaacccactccaagggctgtcacgaaacttgtgggatctgttcttggtgctcgtgaagtgagaagctccattgctgccattgaagctctgggtggcaaagcgatctacagctcttgtgatgtgaactctgctgcagatgttgccaaagcagttagggatgcagagtcccagcttggtgccagagttagtggaatcgttcacgcttctggtgtgctccgtgatcgtctcatagagaagaaactccctgacgagtttgatgctgtctttgggaccaaagtcactgggttggagaatcttctggctgcagttgatcgtgccaacctcaaacacatggttctcttcagctcccttgctggtttccacggcaatgttggtcagtctgactatgcgatggcaaacgaagctctcaacaagatgggtttggaacttgcgaaggatgtcagtgtcaagtccatctgctttggtccctgggatggtgggatggtgacacctcaactcaagaaacagtttcaagaaatgggagttcagatcattcctcgtgaaggaggtgctgatacagttgcgaggattgtgttgggatcaagtcctgctgagatccttgttggaaactggaggacaccatccaagaaagttggaagtgacacgatcaccctgcatagaaagatcagtgccaagtccaatcccttcttggaggatcatgtcatacaaggcagaagggtgttgccaatgacccttgctattgggagccttgctgagacctgccttggactcttccctggctactctctctgggccatagatgacgcacagctcttcaaaggtgtcactgttgatggagacgtcaactgtgaagtgaccctcacaccgtccactgctccgagtgggagggtgaatgtccaagcgacgctcaagacgttctcaagtggaaaacttgttccagcctacagagctgtcatagtgttgtccaaccaaggtgctccacctgccaatgcaaccatgcagcctccgagccttgatgcagatcctgctttgcaagggtcagtctatgatggcaagactctctttcatggtcctgcgttcagaggcattgatgacgttctcagctgcaccaagagccagcttgttgccaagtgttctgctgttcctggatcagatgcagccagaggagagtttgcaactgacactgatgcacatgatccctttgtcaatgatcttgcctttcaagcaatgttggtctgggtgaggagaacgctgggacaagctgcactcccgaactccattcagaggatagtccaacacagaccggtcccacaagacaaacccttctacatcaccctcagatccaatcagagtggtggacatagccagcacaaacatgcacttcagttccacaacgaacaaggtgatctcttcattgatgttcaagcctctgtcattgcgacagactcacttgcgttctgagtagttagcttaatcacttaggtcacccagtccaagcccggcctagcacgatgatcatgagtgttgctattgatgtatgttaatactatacacagtcatcgtgtgtgttttataaaactgtaagcttaggatgtttgaggctaatgtaattagcactacaccgtaataaatgagaggtttactttatgttttaataatgttcttacccttgctgctctctaaactgtaatggcgtacggttagctaaactaaagtaaaaatcgattcgcttgagtaaaattagtgaccgggaaagatcatcgactactactgctcagagatgtaatcggtaattaagacttcaagctcaataattaattaggagtaaatctggcttcgaatttttaaattgtcaacttccaaagaaggattggcaagactcaatctcaattgcccaacaaacatatggctctttacaaatttggaatctctttttgatggcaagaacgtcgtaattcctctgtcgatctcatgtaattaccaaactcatctacttattactttctttatatgcacttactgatgcggccgcttaattaagatgagtgatactcaggactcaggactcactctgctgatcactagtgctagcctcgaggtcgacacaactttgtatacaaaagttgtctagacctaggctcagcaactcatccagtcaagttcgagtcagtgagttgggcggccgcagcttatagtaaagatttttttgttaataaaatgaaagttaatatttatggatttatttgaacatatttacaagtttttgttaataaatttatttacagaagtgttaaatttgaaaatgtgttaaatgagagttaatatttatggatataatattactttatttaaaaataaaatgaatttatattaaaatatgatttggtaaaagatattataaagaggaacttggatgagaaagacgacgatgggcaaaagttgcatggcacaccgcttttgttcagtaacatctgcactgtggcgcctttttcacactcaccatgcatgctgccacgtcagctttcacactatgacaccactggccatacacgttgccacctcagctttctcctcttctcactatgacacgactggccatgcatgcatgcatgctgccacctcagctcccgcctcttcacccgtgtctttctctcatgtcgcagtgctgcgtgccaacctcttctctctataaatagagagaagagaatgatggttaaactcaaaccaaaacaagaaaacatacacaaatagcaaaacggatccacaaccaaaaatgcttaagctctcttgtaacgttaccaatcatcttcacacattctcattctttagcgattctagtctgttcatccctgtcaacagaaggactcttgctgtgtctatggctgcaaggaacgtgagtgcggctcatgagatgcatgacgagaagaggatagctgttgtgggcatggctgttcagtatgctggatgcaaaacgaaagacgagttctgggaagttctcatgaatggaaaagttgagagcaaagtgatcagcgacaaacgtcttggttcaaattaccgtgctgaacactacaaagctgaaaggagcaagtatgctgacaccttctgcaatgagacatatggaactcttgatgagaacgaaatagacaatgagcatgaactccttttgaaccttgccaaacaagccttggctgaaacatctgtcaaagattcaacaagatgtggcatagtttctggatgcctcagcttcccgatggacaacctccaaggtgaactcttgaatgtgtaccagaaccatgttgagaagaaacttggtgccagagttttcaaagatgcctctcactggtcagaaagagaacagtccaacaaaccagaggctggtgacagaagaatcttcatggaccctgcttcctttgttgctgaggaactcaatcttggcgctctccactactctgttgatgctgcctgtgccactgcgctctatgtgctcagactggcgcaagatcacttggtctctggtgcagctgatgtgatgctttgtggtgcaacatgcctgccggagccgtttttcatactctctgggttctcaaccttccaagccatgcctgttggaacgggtcagaatgtgtccatgccgctgcacaaagattctcaaggattgacccctggtgaaggaggttccatcatggtcctcaaacgtttggatgacgcaatcagagatggagatcacatctatggaacacttttgggagccaatgtcagcaacagtggcactggtctgccacttaaaccccttttgccgtcagagaaaaagtgcctcatggacacctacacacgtatcaatgtgcatccccacaagattcagtatgttgaatgccatgcaactgggactccacaaggtgatcgtgtggaaattgatgctgtgaaggcttgctttgaaggcaaagtcccacgttttggaaccacaaaagggaactttggacacacattggtggcagctgggtttgctggcatgtgcaaagtgcttctctccatgaagcacgggatcattccacccactccgggaatagatgacgaaacgaagatggaccctctggttgtctctggtgaggccattccctggccagaaacgaatggagaaccgaagcgtgctggtctctcagcgtttggatttggtgggaccaatgctcatgctgtctttgaggaacatgacccaagcaatgctgcatgcactggccatgactccatttctgctctctctgcacgttgtggtggtgagtcaaacatgagaatagcaatcactgggatggatgccacttttggtgctttgaaaggattggatgcttttgaaagggccatctacactggtgctcatggtgctataccactcccagaaaagagatggagattcctggggaaagacaaggacttccttgatctttgtggagtcaaagcaacaccgcatggctgttacattgaagatgttgaagttgatttccagaggctgaggactccaatgactcctgaagatatgctcttgcctcaacagcttctggctgtcaccacaattgatagggccatattggactctggcatgaagaaaggtggaaatgtggctgtctttgtggggttggggaccgatcttgaactctaccgtcaccgtgcaagggttgctctcaaggagagagtgaggcctgaagccagcaagaaactcaatgacatgatgcagtacatcaatgattgtgggacaagcacttcttacaccagctacataggcaacttggttgcaacaagggtcagttcacaatggggcttcacgggaccttccttcacaatcacagaaggcaacaattctgtgtacagatgtgctgaacttggcaaatacctcttggaaacgggagaggttgatggggttgtggttgcgggtgttgatctctgtgggagtgctgagaacctttacgtcaagtcaaggcgtttcaaggtgtctacatctgacaccccgagagccagctttgatgcagctgctgatggttactttgttggagagggctgtggtgcatttgtgctcaagcgtgagacaagctgcaccaaggatgacagaatctatgcttgcatggatgccatagttcctggaaatgttccatctgcatgtttgagagaggcattggatcaagccagagtcaagcctggagacatcgagatgttggagctttctgctgattcagcgaggcatttgaaggacccgtctgttctcccaaaggaactcactgctgaggaagagattggcggacttcagacgattcttcgtgacgatgacaagctcccaaggaatgttgcaactggaagtgtcaaggccactgttggtgacactggttatgcttctggtgctgccagtttgattaaggctgcgctttgcatctacaaccgttacctgcccagcaatggagatgactgggatgaacctgcacctgaagcaccctgggacagcacactctttgcgtgccagacctcaagagcttggttgaagaaccctggtgagagacgttatgcggctgtttccggagtcagtgaaaccagaagttgctacagtgtgctgctttctgaagcagagggacactacgagagagagaacagaatcagtttggatgaggaagcacccaagctcattgtgttgagagcagactcccatgaagagattcttggaagattggacaagataagggaaaggttcttgcagcccacgggtgctgcacccagagagtctgaattgaaggcgcaagcccgtaggatctttcttgaactccttggtgagacccttgcccaagatgcagcttcatctggaagtcagaagccccttgctctcagcttggtctccactccatccaagctccagagagaggtggaacttgcggcaaaaggcattccgagatgtctcaagatgagacgtgattggagttcccctgctggaagcagatatgcgcctgagcctttggccagtgacagagttgccttcatgtatggagaaggaaggagcccttactatggcatcacacaagacattcataggatttggcctgaacttcatgaggtcatcaatgagaaaacaaaccgtctctgggctgaaggtgacagatgggtcatgccaagggccagcttcaagagtgagcttgagtcacaacagcaagagtttgacagaaacatgattgaaatgttccgtcttggaatcctcacctcaattgccttcacaaacctggcgagagatgttctcaacatcacgcccaaagcagcctttggactcagtttgggagagatttccatgatctttgctttctccaagaaaaacggtttgataagcgatcagttgacaaaggatttgagagagtcagatgtctggaacaaagctctggctgttgagttcaatgcgctcagagaagcctggggcattccacagtctgtcccaaaagatgagttctggcaaggttacatagtgaggggaacgaaacaagacatagaagcagccatagcaccagactcaaagtatgtgaggttgaccatcatcaatgatgccaacactgctctcatcagtggaaagcctgatgcatgcaaagctgcgattgctcgtcttggtggcaacatccctgcgcttccagtcactcaaggcatgtgtgggcattgcccagaggtgggaccttacaccaaggacatcgcaaagatccacgccaaccttgagttccctgtggttgatggtcttgatctctggactaccataaaccagaagaggcttgtgccaagagccacgggtgccaaagatgaatgggctccttcatcctttggggagtatgctggacagctctatgagaaacaagccaacttccctcagatagttgaaaccatctacaagcagaactatgatgtgtttgttgaagttgggccaaacaatcacagaagcacagcagtgagaaccacgcttggaccacagagaaaccaccttgctggtgccatagacaagcagaacgaggatgcttggacgacaatagtcaagctcgtggcttcattgaaggctcaccttgttcctggagtgaccatcagtccgctctaccactccaagctcgttgcagaggctgaggcttgttatgctgcgctctgtaaaggtgagaaacccaagaaaaacaagtttgtgagaaagattcagttgaatggcagattcaacagcaaggcagaccccatctcctcagcagaccttgcatccttcccacctgcggaccctgcgattgaagctgccatctcttcaaggatcatgaagcctgtggctccgaaattctatgcgcgtctcaacattgatgagcaagatgagaccagagatccgatcttgaacaaggacaatgcgccttccagctccagctcttccagcagttcctcttccagcagttcatctccgtctcctgctccttcagctccagttcagaagaaagctgccccagctgcggagacaaaagctgttgccagtgctgatgcacttcgtagtgccctgcttgatcttgactccatgcttgcgctcagctctgcaagtgcttctggcaaccttgttgagactgcgccatctgatgccagtgtcattgtccctccgtgcaacattgctgatcttggcagcagagctttcatgaaaacttatggtgtttctgcgcctctgtacaccggtgcaatggccaagggaattgcctctgcggacttggtgatcgcagctggaaggcaaggaatccttgcgtcatttggtgctggaggccttccaatgcaagttgtgcgtgagtccattgaaaagattcaagctgccctgcccaatggaccatatgctgtcaacctcatccattctccttttgacagcaaccttgagaagggaaatgttgatctcttcttggaaaagggtgtcacttttgttgaggcttcagccttcatgacgttgacaccgcaagttgtcagatacagagcggctgggttgacgaggaatgcagatgggtcagtcaacataaggaacagaatcattgggaaagtctccagaactgagctggctgaaatgttcatgcgtcctgcacctgagcatcttttgcagaagctcattgcttctggggagatcaatcaagaacaagctgagttggccagacgtgttcctgtggctgatgacattgcggttgaagctgattctggtggacacactgacaaccgtccaatccatgtcattctgcctctgattatcaacctgagggataggcttcacagagagtgtggatacccagcaaacctgagggttcgtgttggtgctgggggtggcattgggtgtccccaagctgcgctggcaactttcaacatgggtgcctctttcattgtcactggaacagtgaaccaagttgccaaacaatctgggacgtgtgacaatgtgaggaaacagcttgcgaaagcaacttactcagatgtttgcatggcaccggcagctgacatgtttgaggaaggtgtgaaacttcaagttttgaagaaaggaacaatgttcccttcaagagccaacaaactctatgagttgttctgcaagtatgattcttttgagtccatgcctccagcagagcttgcgagggttgagaaaagaatcttcagtcgtgcattggaagaggtctgggatgagaccaagaacttctacatcaaccgtctccacaacccagagaagatacagagggctgagagggaccccaaactgaagatgtcactgtgtttcagatggtatctgtccctggcttcaaggtgggccaacactggagcttctgacagagtcatggactaccaagtttggtgtggtcctgccattggttcattcaatgatttcatcaaaggaacttaccttgatccggcagtggcaaatgagtacccgtgtgttgtgcagatcaacaaacagattcttagaggagcgtgcttcttgaggcgtcttgaaatactgagaaatgcaaggctttcagatggtgcagctgcacttgtggcgagcattgatgacacatatgtccctgctgagaagctgtgagtagttagcttaatcacttaggtcacccagtccaagcccggcctagcacgatgatcatgagtgttgctattgatgtatgttaatactatacacagtcatcgtgtgtgttttataaaactgtaagcttaggatgtttgaggctaatgtaattagcactacaccgtaataaatgagaggtttactttatgttttaataatgttcttacccttgctgctctctaaactgtaatggcgtacggttagctaaactaaagtaaaaatcgattcgcttgagtaaaattagtgaccgggaaagatcatcgactactactgctcagagatgtaatcggtaattaagacttcaagctcaataattaattaggagtaaatctggcttcgaatttttaaattgtcaacttccaaagaaggattggcaagactcaatctcaattgcccaacaaacatatggctctttacaaatttggaatctctttttgatggcaagaacgtcgtaattcctctgtcgatctcatgtaattaccaaactcatctacttattactttctttatatgcacttactgatgcggccgcttaattaatctgacctgaccactagacctgagtgagtacagatgtgctactagtgctagcctcgaggtcgaccaacttttctatacaaagttgtctagacctaggactaggcactgagtgactcactgacctgactgagtgactggcggccgcagcttatagtaaagatttttttgttaataaaatgaaagttaatatttatggatttatttgaacatatttacaagtttttgttaataaatttatttacagaagtgttaaatttgaaaatgtgttaaatgagagttaatatttatggatataatattactttatttaaaaataaaatgaatttatattaaaatatgatttggtaaaagatattataaagaggaacttggatgagaaagacgacgatgggcaaaagttgcatggcacaccgcttttgttcagtaacatctgcactgtggcgcctttttcacactcaccatgcatgctgccacgtcagctttcacactatgacaccactggccatacacgttgccacctcagctttctcctcttctcactatgacacgactggccatgcatgcatgcatgctgccacctcagctcccgcctcttcacccgtgtctttctctcatgtcgcagtgctgcgtgccaacctcttctctctataaatagagagaagagaatgatggttaaactcaaaccaaaacaagaaaacatacacaaatagcaaaacggatccacaaccaaaaatgcttaagctctcttgtaacgttaccaatcatcttcacacattctcattctttagcgattctagtctgttcatccctgtcaacagaaggactcttgctgtgtctatggcgcttcgtgtcaagaccaacaagaagccatgttgggagatgaccaaggaggaactgacctctggcaaaactgaggtgttcaactatgaggaactcctggagtttgcagagggtgacatagctaaggtttttggtccggagtttgctgtcatagacaagtaccccagaagggtgaggctgcctgctcgtgaatacctgcttgtgacaagggtcacactcatggatgccgaggtcaacaactacagagttggtgccagaatggtcactgagtatgatcttccagtgaatggcgaattgtctgagggaggtgattgtccctgggcagttctggttgagagtggacagtgcgatttgatgctgatatcatacatgggaattgatttccagaaccaaggtgacagagtttaccgtctgctcaacaccacgttgacattctatggggttgcccatgagggagagacccttgagtatgacatcagagtgaccggttttgccaaacgtttggatggtggcatctccatgttcttctttgagtatgactgctatgtcaatgggaggcttctcattgagatgagagatggctgtgctggcttcttcacaaatgaggagcttgatgcgggaaagggtgtggtgttcacaagaggggatttggctgccagagctaagattccaaagcaagatgtttctccctatgctgtcgctccctgccttcacaaaacaaaactcaacgaaaaggagatgcagaccttggttgacaaagattgggcttccgtttttggctcaaagaatggcatgccggagatcaactacaaactctgcgcacgtaagatgctcatgattgatagagtcaccagcattgaccataagggaggtgtgtacggtttgggtcagttggttggtgagaaaatcttggagagggaccattggtacttcccatgccattttgttaaggatcaagtcatggctggatctcttgtcagcgacggttgttcacaaatgctcaagatgtacatgatctggctcggtttgcaccttaccaccggaccatttgacttcagacccgtcaacggacacccgaacaaagttaggtgtaggggtcagatatctcctcataagggaaagttggtctacgtcatggagatcaaagagatgggattcgacgaggataacgatccgtacgccattgctgacgtcaacatcattgacgttgatttcgaaaagggtcaagatttcagccttgatagaatcagcgactacggaaagggggatcttaacaaaaagatcgtcgtggacttcaagggcattgctctcaagatgcagaagagatccacgaacaagaacccctccaaagttcagcccgtttttgctaacggtgcagccactgtgggaccggaagcgtccaaggccagctctggtgccagtgctagtgcttctgctgcccctgcgaagcctgctttctcagcagatgttcttgcgccaaagccagttgcacttcctgaacatatcctcaagggtgacgctctcgctccgaaagaaatgtcctggcatcccatgtcaaaacttcctggcaacccgacgccgttcttctcccctagttcttaccctccgagggcaatttgcttcatccctttccctggcaacccacttgacaacaattgcaaagctggagaaatgcctctgaactggtacaacatgtcagagttcatgtgtggaaaagttagcaactgcttgggaccagagttcgcaagatttgataagtcaaatacgagcagaagccctgcttttgatttggctcttgtgactagagttgttgaagtcacaaacatggaacatggcaagttcctgaatgttgattgcaatcccagcaaaggcacaatggtgggggagtttgactgtcctcaagatgcgtggttctttgatggttcttgcaatgatgggcacatgccttattccatcatcatggaaatcggacttcagacatccggtgttctcaccagtgtgttgaaagcaccactgacgatggacaaagatgacattctctttaggaaccttgatgcaagtgctgaaatggtgaggccagatgtggatgtgagggggaaaaccataaggaatgtgaccaagtgcactggatatgcaatgttgggaaagatggggattcacagattcacgtttgagttgtctgttgatggcgtggttttctacaaaggaagcacttcctttggatggttcactccagaggtgtttgctcagcaagctggacttgacaatgggaaaaagacggagccttggtgcaaaactaacaacacgagtgtgagaagagttgaaatcgcatcagccaaaggcaaagaacagctgactgagaaacttccagatgcaactaatgctcaagttctcagaaggtcagaacagtgtgagtatttggattacctcaacattgctcctgattctgggctgcatgggaaaggatatgcgcatggacacaaagatgttaacccacaagactggttcttctcttgtcacttttggtttgatcctgtgatgcctggatctttgggaattgagtcaatgttccagctcattgaggcatttgcggtggaccagaacataccgggagaatacaatgtgagcaatccgacctttgcccatgcccctggaaaaacggcgtggaagtaccgtggtcaattgacaccaaagaaccgtgcgatggactgtgaggtgcacatagtttcaatcacagcctctcctgaaaatggaggctacgttgacatagtggcagatggagcactttgggttgatggtctccgtgtgtatgaagccaaagaactcagagttcgtgttgtcagtgcaaaacctcaagccattccggatgttcaacaacagccacccagcgcaaaagcggaccctgggaaaactggagttgcactcagtccgactcagttgagagatgtcctgcttgaagtggacaatccattgtatcttggtgttgaaaactccaatttggtgcagtttgaatccaaacctgcaacttcttcaaggattgtcagtatcaaaccatgctccataagtgatcttggtgacaagtccttcatggaaacgtacaatgtgtcagcacctctgtacactggagcaatggccaagggaattgcgtctgcggaccttgtcattgctgctgggaagaggaagatattgggttcttttggagcgggtgggcttccaatgcaccatgtgagggcagctttggagaagatacaagcggctctgcctcaaggaccatatgctgtgaacctcattcattcaccttttgacagcaacttggaaaaggggaatgttgatctcttcctcgaaaagggcgttactgtggtggaggcttctgcattcatgaccctcactccccaagttgttcgttaccgtgcagccggactctcaaggaacgctgatgggagtgtcaacatcagaaaccgtatcattggaaaagtgtccagaacagaactcgccgaaatgttcatcagaccggctccggaacacctccttgagaaactcatagcttctggtgagataacacaagaacaagccgaacttgcccgtcgtgttcctgtcgcagacgacatcgctgttgaagctgattctggtggtcacactgacaaccgtcccatccacgtcatcttgcctttgatcatcaaccttaggaacagactgcacagagagtgtggttatcctgcgcaccttagagtcagagttggagctggaggcggtgttggctgcccacaagctgctgcggctgccctcacaatgggagctgccttcatagtgactgggactgtcaatcaagttgctaaacagtccgggacatgtgacaacgtgagaaaacaactcagtcaagccacctacagtgacatttgcatggctccagcagctgatatgtttgaggaaggtgtgaaactccaagttctcaagaagggaacaatgttcccatcaagagctaacaaattgtacgaactcttttgcaagtacgactctttcgattcaatgcctcctgctgaacttgaaaggatcgagaagaggatcttcaagagggcacttcaagaggtctgggaagagaccaaggacttttacatcaatggtttgaagaatccagagaagatacagagagcggaacatgaccccaaactcaagatgtctttgtgtttcagatggtatcttggtcttgcatcacgttgggccaacatgggtgctcctgatcgtgtcatggactatcaagtctggtgtggtccagccattggagccttcaatgacttcatcaaaggaacatatcttgatcctgctgtctctaatgagtacccatgtgttgtccagatcaaccttcagattttgcgtggtgcatgttacctgaggcgtcttaatgctctgagaaatgatccgaggattgatcttgagactgaagatgctgcctttgtctatgagccaacgaatgcgctttgagtagttagcttaatcacttaggtcacccagtccaagcccggcctagcacgatgatcatgagtgttgctattgatgtatgttaatactatacacagtcatcgtgtgtgttttataaaactgtaagcttaggatgtttgaggctaatgtaattagcactacaccgtaataaatgagaggtttactttatgttttaataatgttcttacccttgctgctctctaaactgtaatggcgtacggttagctaaactaaagtaaaaatcgattcgcttgagtaaaattagtgaccgggaaagatcatcgactactactgctcagagatgtaatcggtaattaagacttcaagctcaataattaattaggagtaaatctggcttcgaatttttaaattgtcaacttccaaagaaggattggcaagactcaatctcaattgcccaacaaacatatggctctttacaaatttggaatctctttttgatggcaagaacgtcgtaattcctctgtcgatctcatgtaattaccaaactcatctacttattactttctttatatgcacttactgatgcggccgcttaattaatcacgagtggatgactgtcacgactgactcatgactgactactagtgctagcctcgaggtcgacacaactttgtataataaagttgtctagacctaggcgagtcatgagtcgtgacatgacgtcatgctcatcagactgcggccgcagcttatagtaaagatttttttgttaataaaatgaaagttaatatttatggatttatttgaacatatttacaagtttttgttaataaatttatttacagaagtgttaaatttgaaaatgtgttaaatgagagttaatatttatggatataatattactttatttaaaaataaaatgaatttatattaaaatatgatttggtaaaagatattataaagaggaacttggatgagaaagacgacgatgggcaaaagttgcatggcacaccgcttttgttcagtaacatctgcactgtggcgcctttttcacactcaccatgcatgctgccacgtcagctttcacactatgacaccactggccatacacgttgccacctcagctttctcctcttctcactatgacacgactggccatgcatgcatgcatgctgccacctcagctcccgcctcttcacccgtgtctttctctcatgtcgcagtgctgcgtgccaacctcttctctctataaatagagagaagagaatgatggttaaactcaaaccaaaacaagaaaacatacacaaatagcaaaacggatccacaaccaaaaatgcccactccagatgccactgcgcctctcaacaagccgtcagactatgctgtgtaccacgaagaggatggtcctttctggactgctgattcctctggtgtcagcagagtgaacttctctgaaactggtgtgggatctgaaggtgtcattcctgcgctcacactgattgatgtgtttgagcgtgcggtcaaacgtggtggcaataggattgcattcagaacagagaacatgccaaccttgaggcgtggagaagaggctcctgatgctttgccgctcaaagattggaagtcctggtcttggaaacagtacaaagctgatgttcacagaattgcgagggctctgatggatttgggagttgagcagcacgatgcggtctccatctttggcttcaactcaccagaatggttcctcagtgctgtcggtgcagttcatgctggtgccaagatcgctggaatctacccttcagacactcctgctcaagtgcagtacaaagccttccactctgacactgctgttgcagttgtggagaacgaacagtgcttcaagaaattcgcagaggtggttgaggatctcccttacctcaaagccattgtttgttgggattatgaagccacagacatcacaagggaagatggttcagtggttgaagtcctgacctttgctgagttcctgaagagaggtgacactgtggaagcagctgcacttgatgagagaatcagcaagattgagcccaccatgtgtgctgccctgatctacaccagtggcacaactgggagacccaaagctgtcatgatctcccatgacaaccttgtctttgaagcatctgctgtggtcccgaacttgggaggggcatgcacgaccactgctgaggaaaggattctttcctaccttcctttgtctcatgttgctggaatgatggttgacatcattgctccaatcatagcgacagcgttccacaaaggaaggatctgtgtttgttttgccagaccgtatgatttgagaactggaacccttgggcaaagactcaatgcagtggagccaaccatattccttggtgtgccacgtgtgtgggaaaagatccaagagaaattgatggctgttggtgccaaaaccactggtctcaagaagaaactcagcacggcagccaagaaacgtgggcttgaatttcaagaggaacaacagatagggagaagtggtgccaaccctggctttggaccgcttggaatctacaagaaacttttgggcctcatcaaaggaaagttggggctgaccaaatgcaagtttgcctttgctggcgcagctccaatgacccgtgaaacccttcagtactttggagcgctgaacatcaacatcaatgaggtctatggaatgtctgaatgcagtggggctgccacctggtcaactgacaaagctcatgagtggggcactgttggctatgagatgccctcctgtgaagtcagagtgttcaagattgcggaggatggcaccaagacagagtgcccaagagctgctgacatcatgcatgccacagaagaggaacaaggtgaagtttgcttccgtggaaggaacatcatgatgggatacttggccaacccgaaacttggtgatgaccatgttgctgagattgaagagaagaatgcagctgccatagatagcgaagggtggcttcactctggtgacaagggagcaatttccacaaggggaatgctcaagataacgggcagatacaaggagcttatcataggtgctggtggggagaatgtggctcctgttcccattgaagatgccatcaaggcgaggatgccttttgtttcaaatgcaatgatggttggagacaagaggaagttcatggctgtccttctgactttgaaaacggttggagcaactggagagcttcctggcacaaacaagctcatgggagcagctgcggactatggtgagaccattgaggatgcctgtgacaatgaggcgctcattgaagagataacgcagcaactcaaagagataggtgacgatggagatgtcacgccaagcaatgcagcccgtatacaaaagttcacgattttgccactcgacttcagtgtctccacagatgaactgacagcaacgttgaaattgaagagaagtgtggttgcagacaagtatgaggacatcatagaggctttctatgagagcaagtctgtctttgtgccttactcaacagttggagcttatgcaacgggtggaccagttgatgactctgttgtggatggatcattcaaaggtgactttagcatgattggggatgacgatccggatcttcagaatgtggatgtccttgaagcaattgatgaggacaactgagtagttagcttaatcacttaggtcacccagtccaagcccggcctagcacgatgatcatgagtgttgctattgatgtatgttaatactatacacagtcatcgtgtgtgttttataaaactgtaagcttaggatgtttgaggctaatgtaattagcactacaccgtaataaatgagaggtttactttatgttttaataatgttcttacccttgctgctctctaaactgtaatggcgtacggttagctaaactaaagtaaaaatcgattcgcttgagtaaaattagtgaccgggaaagatcatcgactactactgctcagagatgtaatcggtaattaagacttcaagctcaataattaattaggagtaaatctggcttcgaatttttaaattgtcaacttccaaagaaggattggcaagactcaatctcaattgcccaacaaacatatggctctttacaaatttggaatctctttttgatggcaagaacgtcgtaattcctctgtcgatctcatgtaattaccaaactcatctacttattactttctttatatgcacttactgatgcggccgcttaattaatctgatcatggatgctacgtcacggcagtacaggactatcactagacctaggagctgtgctgggtaactcacatgagtcactggtcacatcagcggccgcagcttatagtaaagatttttttgttaataaaatgaaagttaatatttatggatttatttgaacatatttacaagtttttgttaataaatttatttacagaagtgttaaatttgaaaatgtgttaaatgagagttaatatttatggatataatattactttatttaaaaataaaatgaatttatattaaaatatgatttggtaaaagatattataaagaggaacttggatgagaaagacgacgatgggcaaaagttgcatggcacaccgcttttgttcagtaacatctgcactgtggcgcctttttcacactcaccatgcatgctgccacgtcagctttcacactatgacaccactggccatacacgttgccacctcagctttctcctcttctcactatgacacgactggccatgcatgcatgcatgctgccacctcagctcccgcctcttcacccgtgtctttctctcatgtcgcagtgctgcgtgccaacctcttctctctataaatagagagaagagaatgatggttaaactcaaaccaaaacaagaaaacatacacaaatagcaaaacggatccacaaccaaaaatgcttaagctctcttgtaacgttaccaatcatcttcacacattctcattctttagcgattctagtctgttcatccctgtcaacagaaggactcttgctgtgtctatgcttcagcacacttggcttccgaagcctcccaatctgaccctcttgtcagatgaggttcatctctggaggattcctcttgaccagcctgagtcacaacttcaagaccttgctgccaccctgagcagtgatgaattggcgagggcaaacagattctactttccagaacacagaaggcgtttcactgctgggagaggcatcctcagatccatcttgggtggatacttgggagtggaaccgggtcaagtcaagtttgattatgagtcccgtgggaaaccgatccttggtgacagatttgctgagagtggactcctgttcaacttgtctcacagccagaaccttgccttgtgtgctgtcaactacacgcgtcaaataggcattgatcttgaatatctgcgtccaacatctgacttggagtctcttgcaaagaggttctttctcccaagagaatatgaactcttgaggtcactccctgatgagcagaaacagaagattttctttcgttactggacttgcaaagaggcttatctcaaagcaacgggagatggaatagccaaacttgaagagatcgagatagcactcaccccaacagaacctgccaagctccaaacagctcctgcgtggtctctgttggagcttgtgccagatgacaattgtgttgcagctgtggctgttgcgggttttggttggcagcccaagttctggcattactgagtagttagcttaatcacttaggtcacccagtccaagcccggcctagcacgatgatcatgagtgttgctattgatgtatgttaatactatacacagtcatcgtgtgtgttttataaaactgtaagcttaggatgtttgaggctaatgtaattagcactacaccgtaataaatgagaggtttactttatgttttaataatgttcttacccttgctgctctctaaactgtaatggcgtacggttagctaaactaaagtaaaaatcgattcgcttgagtaaaattagtgaccgggaaagatcatcgactactactgctcagagatgtaatcggtaattaagacttcaagctcaataattaattaggagtaaatctggcttcgaatttttaaattgtcaacttccaaagaaggattggcaagactcaatctcaattgcccaacaaacatatggctctttacaaatttggaatctctttttgatggcaagaacgtcgtaattcctctgtcgatctcatgtaattaccaaactcatctacttattactttctttatatgcacttactgatgcggccgcttaattaactactgtcactgaggccgtagacgagtacggactgatctaactagtgctagcctcgaggtcgacacccagctttc

SEQ ID NO: 38 - DNA, 38742 bp, Artificial sequence
  plasmid pDAB101476
aattacaacggtatatatcctgccagtcagcatcatcacaccaaaagttaggcccgaatagtttgaaattagaaagctcgcaattgaggtctacaggccaaattcgctcttagccgtacaatattactcaccggatcctaaccggtttaattaaggcgcgccatgcccgggcaagcggccgcacaagtttgtacaaaaaagcaggcttctagacctaggtggagtcatcacgcagactatctcagcatgtgcgtagcacgcggccgcagcttatagtaaagatttttttgttaataaaatgaaagttaatatttatggatttatttgaacatatttacaagtttttgttaataaatttatttacagaagtgttaaatttgaaaatgtgttaaatgagagttaatatttatggatataatattactttatttaaaaataaaatgaatttatattaaaatatgatttggtaaaagatattataaagaggaacttggatgagaaagacgacgatgggcaaaagttgcatggcacaccgcttttgttcagtaacatctgcactgtggcgcctttttcacactcaccatgcatgctgccacgtcagctttcacactatgacaccactggccatacacgttgccacctcagctttctcctcttctcactatgacacgactggccatgcatgcatgcatgctgccacctcagctcccgcctcttcacccgtgtctttctctcatgtcgcagtgctgcgtgccaacctcttctctctataaatagagagaagagaatgatggttaaactcaaaccaaaacaagaaaacatacacaaatagcaaaacggatccacaaccaaaaatggcagcgaggctgcaagagcagaaaggaggtgagatggacacgaggattgcgatcataggcatgagcgccatacttccttgtggaaccacggtgagagagtcatgggagaccataagggctggcattgattgcctgtctgatcttcctgaggatcgtgttgatgtgactgcgtactttgacccagtcaagaccacaaaggacaaaatctactgcaagagaggaggtttcattcctgagtatgactttgatgcgcgtgagtttggtctcaacatgttccagatggaagattctgatgcgaatcagaccatctcacttctcaaggtcaaagaagcacttcaagatgctgggattgatgcacttggaaaggagaagaaaaacataggatgcgtgcttggcattggaggtggacagaagagttcacatgagttctacagcagactcaactatgtggttgtggagaaagtcttgagaaagatggggatgccagaggaagatgtcaaagtggctgtggagaagtacaaagcgaacttcccagaatggagacttgactctttccctggattccttgggaatgtcactgctggcagatgcaccaacacattcaacttggatggcatgaactgcgttgtggatgctgcatgtgcaagctccttgatagcagtcaaggttgcgattgatgaactgctctatggtgactgcgacatgatggtcactggtgcaacctgcacagacaactccattgggatgtacatggctttctcaaagacacctgtgttcagcacggacccaagtgtgagagcgtatgatgagaaaacgaaagggatgctcattggtgagggatcagccatgttggtgctcaaacgttatgcagatgcagtgagggatggtgatgagattcatgctgtgattcgtggttgtgcaagctcaagtgatggcaaagcagctggcatctacactcccacaatcagtggtcaagaggaagccttgagacgtgcatacaatcgtgcctgcgttgaccctgccactgtcactttggttgagggtcatgggactggcactccagttggagataggattgagttgactgcgttgaggaacttgtttgacaaagcgtatggtgaagggaacacagagaaagttgcagttggaagtatcaagtccagtattggtcatttgaaggctgttgctggtcttgctggaatgatcaaggtcatcatggctctcaaacacaagactttgcctggaacgatcaatgtggacaatccacccaatctctatgacaacactcccatcaatgagtcatccctctacatcaacacgatgaacagaccctggttccctccacctggtgttccgagacgtgctggaatatccagctttggctttggaggtgccaactaccatgcagtgttggaagaggctgaaccagagcacacgacagcgtacagactcaacaaacgtccacaaccggtgttgatgatggctgcaactcctgctgcgttgcagagcctttgtgaagctcagctgaaagagtttgaagctgcgatcaaggagaatgagacagtcaagaatactgcctacatcaagtgtgtcaagtttggagaacagttcaagttccctgggagcatacctgcgaccaatgcgagactgggattcttggtcaaagatgcggaggatgcgtgctccacgcttcgtgctatatgtgctcagtttgccaaagatgtgaccaaagaagcgtggaggcttccgagagaaggagtttctttccgtgccaaaggcattgccaccaatggtgctgttgctgcactcttctctggacaaggtgctcagtacacacacatgttcagtgaagttgcgatgaactggcctcagttcagacagtccattgctgcaatggacgctgcacagtccaaggttgctggaagtgacaaagactttgaaagagtctctcaagtcctgtacccaaggaaaccgtacgaacgtgagccagaacaagatcacaagaaaatctcactcacagcatacagccagccgtcaaccctggcatgtgctcttggtgcctttgagattttcaaggaagctggattcactccagactttgcagctggacacagcttgggtgagtttgctgcgctctatgcagctggttgtgttgacagagatgagttgtttgaacttgtttgcagaagggcaaggatcatgggaggcaaagatgcacctgccacacccaaaggttgcatggcagctgtcataggacccaacgcagagaacatcaaggttcaagctgccaacgtctggcttggaaactcaaactctccgtctcagactgtcattactgggtctgttgaagggattcaagctgaaagtgccagattgcagaaggaagggttcagagttgtgcctcttgcttgtgagtctgccttccattctccacagatggaaaatgccagctcagctttcaaagatgtcatatccaaggtttccttccgtacacccaaagcagaaacaaagctcttcagcaatgtttctggagagacctatccgacggatgccagagagatgctcactcaacacatgacctcatctgtgaagttcctgacccaagtgaggaacatgcaccaagctggtgcgagaatctttgttgagtttggaccgaaacaagttctcagcaaacttgtttctgaaaccctcaaagatgacccgtctgttgtcacagtgtctgtgaacccagcttctggcacggactctgacatacagttgagggatgctgcagttcagctggttgtggctggtgtcaatcttcaagggtttgacaagtgggatgctcctgatgccacgaggatgcaagccatcaagaaaaagagaaccacactcagactttcagctgccacctatgtcagtgacaagaccaagaaagtgagggatgctgccatgaacgacggaagatgtgtcacatacctcaagggtgctgcaccactcatcaaggctcctgaacctgtggttgacgaagctgccaagagggaggctgaaaggcttcagaaggagcttcaagacgctcagaggcagcttgacgacgccaaacgtgcagctgcagaagccaactccaaacttgctgctgccaaggaggaagccaagactgctgcagcttcagccaagcctgcagttgacactgctgttgtggagaaacatcgtgccatcctcaagtccatgctggctgagctggatggttatggaagtgttgatgcttcttcccttcagcaacagcaacagcaacagactgctccggcgcctgttaaagccgctgcccctgccgctcccgttgcaagtgctcctgctcccgccgtgtccaacgagttgcttgagaaagctgagacagttgtgatggaggttctcgctgccaagactggatacgaaacagacatgattgaggcggacatggagcttgagactgagttgggaattgacagcatcaagagggttgaaattctttctgaagtccaagctatgcttaacgttgaggcgaaagatgttgatgctctctctaggacgagaacagtgggtgaagttgtcaacgctatgaaggcagaaatcgctggttcttccgctccggcgccggcagctgccgcacctgcaccggctaaagcggctccagctgcagctgcaccagctgtttctaatgagctgctcgaaaaggcagaaactgttgtgatggaagtccttgctgccaaaactggctacgaaactgacatgatagaatcagacatggagcttgagacggagcttggaattgattccatcaagcgtgtggaaatcctcagtgaagtccaagccatgctcaatgtggaagctaaggatgtggatgctctctcaaggaccagaactgtcggtgaggttgtcaatgccatgaaggctgagatagctggaggctccgctcctgcgccggccgctgccgctcctggtcccgctgccgcggctccagctccagctgcagccgctccggccgtctcaaacgaactccttgaaaaagctgagaccgtcgtgatggaggtcttggcagctaaaaccggctatgagactgacatgattgagtctgacatggaattggagacagaacttgggatagacagcatcaaacgtgttgaaatcctcagtgaggtccaagctatgctgaacgtggaagcgaaggatgttgatgctctgtccagaacgaggaccgttggtgaggttgtggatgccatgaaggctgaaattgctggagggtctgcgcccgcgccagctgcagccgctcctgcacccgcagccgcggcacctgctccagctgcacctgcacctgccgtttcttcagaactcttggagaaggctgagacggttgtgatggaggttttggctgcaaagactggctatgagaccgacatgattgaatctgatatggaattggagacagagcttgggatcgattccatcaaaagagtggagatcctgagtgaagtccaagccatgctcaatgttgaagctaaggatgttgatgcactttcaagaacaaggacagtgggtgaggttgtggatgccatgaaggcggagattgctggagggagcgcgcctgcgccagctgccgcggcacctgcaccggcagccgcagctccagctccagctgcaccagcaccggccgcgcccgcgccagctgtttcatccgaactcctggaaaaggccgagacggttgtgatggaggtgctcgcagctaagactggttacgagaccgacatgattgaaagtgacatggagcttgaaaccgagttgggaatagatagcatcaaacgtgttgaaatcttgtctgaggtccaagctatgttgaacgtggaggcaaaagatgtcgatgcgctttcaagaaccagaacagtcggtgaggtcgtggacgccatgaaggctgaaattgccggaagctctgctagtgcgccagctgcagccgcacctgcacctgctgccgcggcacctgctccagctgcagccgctcctgccgtcagcaatgagttgctggagaaagccgaaacagttgtgatggaagtccttgctgcaaaaactggttacgaaacggacatgattgagtcagacatggaattggagaccgaacttggaatagattccatcaagagagtggagatcctctctgaggtgcaagccatgctcaacgttgaggctaaagatgttgatgcactcagtaggacaagaactgtgggggaagttgtcgatgcgatgaaggctgagattgctggaggctctgctcctgcgccggcagctgccgcacctgcacccgcagccgcggcaccagctgtcagcaacgaattgcttgagaaggctgaaacagttgtcatggaagtgctggctgcaaaaaccggctatgagactgacatgattgagtctgacatggaacttgagacggaattgggcattgacagcatcaagcgtgttgagatcctcagtgaagtccaagcaatgctcaatgtggaggctaaggatgtggatgccctctcaaggaccagaacagttggtgaggtcgttgatgcgatgaaggcggagatcgctggaagttccgcgcctgcgccagctgcagccgctcctgcacccgcagccgcggcaccggctccagctgcagccgcaccggccgtctcctcagaactcctggaaaaggctgagacagttgtgatggaagtccttgctgcgaaaactggctatgagaccgacatgattgaatctgacatggaactggagaccgagcttggaattgactccatcaaacgtgttgaaatcctctctgaggttcaagcgatgttgaatgtggaggccaaagatgttgatgctctttccagaacaaggacggtgggagaggtggttgatgccatgaaggctgagatagctgggggttctgctcctgcgccagctgcagccgctcctgctcccgctgccgcggcaccagctgtcagcaacgaactccttgaaaaagctgaaactgttgtgatggaggttttggctgcaaagactggatacgagactgacatgatagagtcagacatggagttggaaacagagcttgggattgatagcatcaagcgtgtggaaatcctttctgaggttcaagccatgctgaacgttgaggccaaagatgtcgatgctttgtcaaggaccagaacggttggagaagtggtcgatgccatgaaggctgagatagctggtggatcagcccctgctccggctgcagccgctcctgcaagtgccggtgctgcaccagctgtgaagattgattcagttcatggtgctgactgtgacgatttgtcactgatgcacgcaaaggtggttgacatcagaaggccagatgaactgattctggaaagaccggagaaccgtccagttcttgtcgttgacgatggctcagagttgacacttgctcttgtgagggtgttgggagcctgtgcagttgtcttgacctttgagggattgcagttggctcagagagctggtgcagctgccattcgtcatgttctggctaaggacctttcagcagaatcagctgagaaggccatcaaagaggctgagcaaagatttggagcgttgggaggcttcataagccagcaagcagaaaggtttgaaccagctgagatactgggtttcacactcatgtgtgcgaagtttgccaaagcctctctctgcactgctgtggctggaggtcgtcctgccttcatcggtgtggctaggcttgacggcagacttggattcacctctcaaggcacttctgacgcactcaagagagcacagcgtggagcgatctttggactctgcaagacaatagggttggagtggtcagaatctgatgtgttcagccgtggtgtggacattgctcaagggatgcacccagaagatgctgcagttgccatagttagggagatggcgtgtgctgacatcagaatcagagaggttgggattggagcaaaccagcaaagatgcacaatcagagctgccaagttggagactgggaaccctcagagacagatagcgaaagacgatgtgcttctggtttctggaggtgctcgtgggatcacacctctttgcatccgtgagatcacgcgtcagattgctggaggcaagtacattctgttgggtcgtagcaaagtttctgcgtctgaaccagcatggtgtgctggcatcactgatgagaaggctgtgcagaaagctgccacccaagagttgaagagggccttcagtgctggtgaaggacccaaacccactccaagggctgtcacgaaacttgtgggatctgttcttggtgctcgtgaagtgagaagctccattgctgccattgaagctctgggtggcaaagcgatctacagctcttgtgatgtgaactctgctgcagatgttgccaaagcagttagggatgcagagtcccagcttggtgccagagttagtggaatcgttcacgcttctggtgtgctccgtgatcgtctcatagagaagaaactccctgacgagtttgatgctgtctttgggaccaaagtcactgggttggagaatcttctggctgcagttgatcgtgccaacctcaaacacatggttctcttcagctcccttgctggtttccacggcaatgttggtcagtctgactatgcgatggcaaacgaagctctcaacaagatgggtttggaacttgcgaaggatgtcagtgtcaagtccatctgctttggtccctgggatggtgggatggtgacacctcaactcaagaaacagtttcaagaaatgggagttcagatcattcctcgtgaaggaggtgctgatacagttgcgaggattgtgttgggatcaagtcctgctgagatccttgttggaaactggaggacaccatccaagaaagttggaagtgacacgatcaccctgcatagaaagatcagtgccaagtccaatcccttcttggaggatcatgtcatacaaggcagaagggtgttgccaatgacccttgctattgggagccttgctgagacctgccttggactcttccctggctactctctctgggccatagatgacgcacagctcttcaaaggtgtcactgttgatggagacgtcaactgtgaagtgaccctcacaccgtccactgctccgagtgggagggtgaatgtccaagcgacgctcaagacgttctcaagtggaaaacttgttccagcctacagagctgtcatagtgttgtccaaccaaggtgctccacctgccaatgcaaccatgcagcctccgagccttgatgcagatcctgctttgcaagggtcagtctatgatggcaagactctctttcatggtcctgcgttcagaggcattgatgacgttctcagctgcaccaagagccagcttgttgccaagtgttctgctgttcctggatcagatgcagccagaggagagtttgcaactgacactgatgcacatgatccctttgtcaatgatcttgcctttcaagcaatgttggtctgggtgaggagaacgctgggacaagctgcactcccgaactccattcagaggatagtccaacacagaccggtcccacaagacaaacccttctacatcaccctcagatccaatcagagtggtggacatagccagcacaaacatgcacttcagttccacaacgaacaaggtgatctcttcattgatgttcaagcctctgtcattgcgacagactcacttgcgttctgagtagttagcttaatcacttaggtcacccagtccaagcccggcctagcacgatgatcatgagtgttgctattgatgtatgttaatactatacacagtcatcgtgtgtgttttataaaactgtaagcttaggatgtttgaggctaatgtaattagcactacaccgtaataaatgagaggtttactttatgttttaataatgttcttacccttgctgctctctaaactgtaatggcgtacggttagctaaactaaagtaaaaatcgattcgcttgagtaaaattagtgaccgggaaagatcatcgactactactgctcagagatgtaatcggtaattaagacttcaagctcaataattaattaggagtaaatctggcttcgaatttttaaattgtcaacttccaaagaaggattggcaagactcaatctcaattgcccaacaaacatatggctctttacaaatttggaatctctttttgatggcaagaacgtcgtaattcctctgtcgatctcatgtaattaccaaactcatctacttattactttctttatatgcacttactgatgcggccgcttaattaagatgagtgatactcaggactcaggactcactctgctgatcactagtgctagcctcgaggtcgacacaactttgtatacaaaagttgtctagacctaggctcagcaactcatccagtcaagttcgagtcagtgagttgggcggccgcagcttatagtaaagatttttttgttaataaaatgaaagttaatatttatggatttatttgaacatatttacaagtttttgttaataaatttatttacagaagtgttaaatttgaaaatgtgttaaatgagagttaatatttatggatataatattactttatttaaaaataaaatgaatttatattaaaatatgatttggtaaaagatattataaagaggaacttggatgagaaagacgacgatgggcaaaagttgcatggcacaccgcttttgttcagtaacatctgcactgtggcgcctttttcacactcaccatgcatgctgccacgtcagctttcacactatgacaccactggccatacacgttgccacctcagctttctcctcttctcactatgacacgactggccatgcatgcatgcatgctgccacctcagctcccgcctcttcacccgtgtctttctctcatgtcgcagtgctgcgtgccaacctcttctctctataaatagagagaagagaatgatggttaaactcaaaccaaaacaagaaaacatacacaaatagcaaaacggatccacaaccaaaaatggctgcaaggaacgtgagtgcggctcatgagatgcatgacgagaagaggatagctgttgtgggcatggctgttcagtatgctggatgcaaaacgaaagacgagttctgggaagttctcatgaatggaaaagttgagagcaaagtgatcagcgacaaacgtcttggttcaaattaccgtgctgaacactacaaagctgaaaggagcaagtatgctgacaccttctgcaatgagacatatggaactcttgatgagaacgaaatagacaatgagcatgaactccttttgaaccttgccaaacaagccttggctgaaacatctgtcaaagattcaacaagatgtggcatagtttctggatgcctcagcttcccgatggacaacctccaaggtgaactcttgaatgtgtaccagaaccatgttgagaagaaacttggtgccagagttttcaaagatgcctctcactggtcagaaagagaacagtccaacaaaccagaggctggtgacagaagaatcttcatggaccctgcttcctttgttgctgaggaactcaatcttggcgctctccactactctgttgatgctgcctgtgccactgcgctctatgtgctcagactggcgcaagatcacttggtctctggtgcagctgatgtgatgctttgtggtgcaacatgcctgccggagccgtttttcatactctctgggttctcaaccttccaagccatgcctgttggaacgggtcagaatgtgtccatgccgctgcacaaagattctcaaggattgacccctggtgaaggaggttccatcatggtcctcaaacgtttggatgacgcaatcagagatggagatcacatctatggaacacttttgggagccaatgtcagcaacagtggcactggtctgccacttaaaccccttttgccgtcagagaaaaagtgcctcatggacacctacacacgtatcaatgtgcatccccacaagattcagtatgttgaatgccatgcaactgggactccacaaggtgatcgtgtggaaattgatgctgtgaaggcttgctttgaaggcaaagtcccacgttttggaaccacaaaagggaactttggacacacattggtggcagctgggtttgctggcatgtgcaaagtgcttctctccatgaagcacgggatcattccacccactccgggaatagatgacgaaacgaagatggaccctctggttgtctctggtgaggccattccctggccagaaacgaatggagaaccgaagcgtgctggtctctcagcgtttggatttggtgggaccaatgctcatgctgtctttgaggaacatgacccaagcaatgctgcatgcactggccatgactccatttctgctctctctgcacgttgtggtggtgagtcaaacatgagaatagcaatcactgggatggatgccacttttggtgctttgaaaggattggatgcttttgaaagggccatctacactggtgctcatggtgctataccactcccagaaaagagatggagattcctggggaaagacaaggacttccttgatctttgtggagtcaaagcaacaccgcatggctgttacattgaagatgttgaagttgatttccagaggctgaggactccaatgactcctgaagatatgctcttgcctcaacagcttctggctgtcaccacaattgatagggccatattggactctggcatgaagaaaggtggaaatgtggctgtctttgtggggttggggaccgatcttgaactctaccgtcaccgtgcaagggttgctctcaaggagagagtgaggcctgaagccagcaagaaactcaatgacatgatgcagtacatcaatgattgtgggacaagcacttcttacaccagctacataggcaacttggttgcaacaagggtcagttcacaatggggcttcacgggaccttccttcacaatcacagaaggcaacaattctgtgtacagatgtgctgaacttggcaaatacctcttggaaacgggagaggttgatggggttgtggttgcgggtgttgatctctgtgggagtgctgagaacctttacgtcaagtcaaggcgtttcaaggtgtctacatctgacaccccgagagccagctttgatgcagctgctgatggttactttgttggagagggctgtggtgcatttgtgctcaagcgtgagacaagctgcaccaaggatgacagaatctatgcttgcatggatgccatagttcctggaaatgttccatctgcatgtttgagagaggcattggatcaagccagagtcaagcctggagacatcgagatgttggagctttctgctgattcagcgaggcatttgaaggacccgtctgttctcccaaaggaactcactgctgaggaagagattggcggacttcagacgattcttcgtgacgatgacaagctcccaaggaatgttgcaactggaagtgtcaaggccactgttggtgacactggttatgcttctggtgctgccagtttgattaaggctgcgctttgcatctacaaccgttacctgcccagcaatggagatgactgggatgaacctgcacctgaagcaccctgggacagcacactctttgcgtgccagacctcaagagcttggttgaagaaccctggtgagagacgttatgcggctgtttccggagtcagtgaaaccagaagttgctacagtgtgctgctttctgaagcagagggacactacgagagagagaacagaatcagtttggatgaggaagcacccaagctcattgtgttgagagcagactcccatgaagagattcttggaagattggacaagataagggaaaggttcttgcagcccacgggtgctgcacccagagagtctgaattgaaggcgcaagcccgtaggatctttcttgaactccttggtgagacccttgcccaagatgcagcttcatctggaagtcagaagccccttgctctcagcttggtctccactccatccaagctccagagagaggtggaacttgcggcaaaaggcattccgagatgtctcaagatgagacgtgattggagttcccctgctggaagcagatatgcgcctgagcctttggccagtgacagagttgccttcatgtatggagaaggaaggagcccttactatggcatcacacaagacattcataggatttggcctgaacttcatgaggtcatcaatgagaaaacaaaccgtctctgggctgaaggtgacagatgggtcatgccaagggccagcttcaagagtgagcttgagtcacaacagcaagagtttgacagaaacatgattgaaatgttccgtcttggaatcctcacctcaattgccttcacaaacctggcgagagatgttctcaacatcacgcccaaagcagcctttggactcagtttgggagagatttccatgatctttgctttctccaagaaaaacggtttgataagcgatcagttgacaaaggatttgagagagtcagatgtctggaacaaagctctggctgttgagttcaatgcgctcagagaagcctggggcattccacagtctgtcccaaaagatgagttctggcaaggttacatagtgaggggaacgaaacaagacatagaagcagccatagcaccagactcaaagtatgtgaggttgaccatcatcaatgatgccaacactgctctcatcagtggaaagcctgatgcatgcaaagctgcgattgctcgtcttggtggcaacatccctgcgcttccagtcactcaaggcatgtgtgggcattgcccagaggtgggaccttacaccaaggacatcgcaaagatccacgccaaccttgagttccctgtggttgatggtcttgatctctggactaccataaaccagaagaggcttgtgccaagagccacgggtgccaaagatgaatgggctccttcatcctttggggagtatgctggacagctctatgagaaacaagccaacttccctcagatagttgaaaccatctacaagcagaactatgatgtgtttgttgaagttgggccaaacaatcacagaagcacagcagtgagaaccacgcttggaccacagagaaaccaccttgctggtgccatagacaagcagaacgaggatgcttggacgacaatagtcaagctcgtggcttcattgaaggctcaccttgttcctggagtgaccatcagtccgctctaccactccaagctcgttgcagaggctgaggcttgttatgctgcgctctgtaaaggtgagaaacccaagaaaaacaagtttgtgagaaagattcagttgaatggcagattcaacagcaaggcagaccccatctcctcagcagaccttgcatccttcccacctgcggaccctgcgattgaagctgccatctcttcaaggatcatgaagcctgtggctccgaaattctatgcgcgtctcaacattgatgagcaagatgagaccagagatccgatcttgaacaaggacaatgcgccttccagctccagctcttccagcagttcctcttccagcagttcatctccgtctcctgctccttcagctccagttcagaagaaagctgccccagctgcggagacaaaagctgttgccagtgctgatgcacttcgtagtgccctgcttgatcttgactccatgcttgcgctcagctctgcaagtgcttctggcaaccttgttgagactgcgccatctgatgccagtgtcattgtccctccgtgcaacattgctgatcttggcagcagagctttcatgaaaacttatggtgtttctgcgcctctgtacaccggtgcaatggccaagggaattgcctctgcggacttggtgatcgcagctggaaggcaaggaatccttgcgtcatttggtgctggaggccttccaatgcaagttgtgcgtgagtccattgaaaagattcaagctgccctgcccaatggaccatatgctgtcaacctcatccattctccttttgacagcaaccttgagaagggaaatgttgatctcttcttggaaaagggtgtcacttttgttgaggcttcagccttcatgacgttgacaccgcaagttgtcagatacagagcggctgggttgacgaggaatgcagatgggtcagtcaacataaggaacagaatcattgggaaagtctccagaactgagctggctgaaatgttcatgcgtcctgcacctgagcatcttttgcagaagctcattgcttctggggagatcaatcaagaacaagctgagttggccagacgtgttcctgtggctgatgacattgcggttgaagctgattctggtggacacactgacaaccgtccaatccatgtcattctgcctctgattatcaacctgagggataggcttcacagagagtgtggatacccagcaaacctgagggttcgtgttggtgctgggggtggcattgggtgtccccaagctgcgctggcaactttcaacatgggtgcctctttcattgtcactggaacagtgaaccaagttgccaaacaatctgggacgtgtgacaatgtgaggaaacagcttgcgaaagcaacttactcagatgtttgcatggcaccggcagctgacatgtttgaggaaggtgtgaaacttcaagttttgaagaaaggaacaatgttcccttcaagagccaacaaactctatgagttgttctgcaagtatgattcttttgagtccatgcctccagcagagcttgcgagggttgagaaaagaatcttcagtcgtgcattggaagaggtctgggatgagaccaagaacttctacatcaaccgtctccacaacccagagaagatacagagggctgagagggaccccaaactgaagatgtcactgtgtttcagatggtatctgtccctggcttcaaggtgggccaacactggagcttctgacagagtcatggactaccaagtttggtgtggtcctgccattggttcattcaatgatttcatcaaaggaacttaccttgatccggcagtggcaaatgagtacccgtgtgttgtgcagatcaacaaacagattcttagaggagcgtgcttcttgaggcgtcttgaaatactgagaaatgcaaggctttcagatggtgcagctgcacttgtggcgagcattgatgacacatatgtccctgctgagaagctgtgagtagttagcttaatcacttaggtcacccagtccaagcccggcctagcacgatgatcatgagtgttgctattgatgtatgttaatactatacacagtcatcgtgtgtgttttataaaactgtaagcttaggatgtttgaggctaatgtaattagcactacaccgtaataaatgagaggtttactttatgttttaataatgttcttacccttgctgctctctaaactgtaatggcgtacggttagctaaactaaagtaaaaatcgattcgcttgagtaaaattagtgaccgggaaagatcatcgactactactgctcagagatgtaatcggtaattaagacttcaagctcaataattaattaggagtaaatctggcttcgaatttttaaattgtcaacttccaaagaaggattggcaagactcaatctcaattgcccaacaaacatatggctctttacaaatttggaatctctttttgatggcaagaacgtcgtaattcctctgtcgatctcatgtaattaccaaactcatctacttattactttctttatatgcacttactgatgcggccgcttaattaatctgacctgaccactagacctgagtgagtacagatgtgctactagtgctagcctcgaggtcgaccaacttttctatacaaagttgtctagacctaggactaggcactgagtgactcactgacctgactgagtgactggcggccgcagcttatagtaaagatttttttgttaataaaatgaaagttaatatttatggatttatttgaacatatttacaagtttttgttaataaatttatttacagaagtgttaaatttgaaaatgtgttaaatgagagttaatatttatggatataatattactttatttaaaaataaaatgaatttatattaaaatatgatttggtaaaagatattataaagaggaacttggatgagaaagacgacgatgggcaaaagttgcatggcacaccgcttttgttcagtaacatctgcactgtggcgcctttttcacactcaccatgcatgctgccacgtcagctttcacactatgacaccactggccatacacgttgccacctcagctttctcctcttctcactatgacacgactggccatgcatgcatgcatgctgccacctcagctcccgcctcttcacccgtgtctttctctcatgtcgcagtgctgcgtgccaacctcttctctctataaatagagagaagagaatgatggttaaactcaaaccaaaacaagaaaacatacacaaatagcaaaacggatccacaaccaaaaatggcgcttcgtgtcaagaccaacaagaagccatgttgggagatgaccaaggaggaactgacctctggcaaaactgaggtgttcaactatgaggaactcctggagtttgcagagggtgacatagctaaggtttttggtccggagtttgctgtcatagacaagtaccccagaagggtgaggctgcctgctcgtgaatacctgcttgtgacaagggtcacactcatggatgccgaggtcaacaactacagagttggtgccagaatggtcactgagtatgatcttccagtgaatggcgaattgtctgagggaggtgattgtccctgggcagttctggttgagagtggacagtgcgatttgatgctgatatcatacatgggaattgatttccagaaccaaggtgacagagtttaccgtctgctcaacaccacgttgacattctatggggttgcccatgagggagagacccttgagtatgacatcagagtgaccggttttgccaaacgtttggatggtggcatctccatgttcttctttgagtatgactgctatgtcaatgggaggcttctcattgagatgagagatggctgtgctggcttcttcacaaatgaggagcttgatgcgggaaagggtgtggtgttcacaagaggggatttggctgccagagctaagattccaaagcaagatgtttctccctatgctgtcgctccctgccttcacaaaacaaaactcaacgaaaaggagatgcagaccttggttgacaaagattgggcttccgtttttggctcaaagaatggcatgccggagatcaactacaaactctgcgcacgtaagatgctcatgattgatagagtcaccagcattgaccataagggaggtgtgtacggtttgggtcagttggttggtgagaaaatcttggagagggaccattggtacttcccatgccattttgttaaggatcaagtcatggctggatctcttgtcagcgacggttgttcacaaatgctcaagatgtacatgatctggctcggtttgcaccttaccaccggaccatttgacttcagacccgtcaacggacacccgaacaaagttaggtgtaggggtcagatatctcctcataagggaaagttggtctacgtcatggagatcaaagagatgggattcgacgaggataacgatccgtacgccattgctgacgtcaacatcattgacgttgatttcgaaaagggtcaagatttcagccttgatagaatcagcgactacggaaagggggatcttaacaaaaagatcgtcgtggacttcaagggcattgctctcaagatgcagaagagatccacgaacaagaacccctccaaagttcagcccgtttttgctaacggtgcagccactgtgggaccggaagcgtccaaggccagctctggtgccagtgctagtgcttctgctgcccctgcgaagcctgctttctcagcagatgttcttgcgccaaagccagttgcacttcctgaacatatcctcaagggtgacgctctcgctccgaaagaaatgtcctggcatcccatgtcaaaacttcctggcaacccgacgccgttcttctcccctagttcttaccctccgagggcaatttgcttcatccctttccctggcaacccacttgacaacaattgcaaagctggagaaatgcctctgaactggtacaacatgtcagagttcatgtgtggaaaagttagcaactgcttgggaccagagttcgcaagatttgataagtcaaatacgagcagaagccctgcttttgatttggctcttgtgactagagttgttgaagtcacaaacatggaacatggcaagttcctgaatgttgattgcaatcccagcaaaggcacaatggtgggggagtttgactgtcctcaagatgcgtggttctttgatggttcttgcaatgatgggcacatgccttattccatcatcatggaaatcggacttcagacatccggtgttctcaccagtgtgttgaaagcaccactgacgatggacaaagatgacattctctttaggaaccttgatgcaagtgctgaaatggtgaggccagatgtggatgtgagggggaaaaccataaggaatgtgaccaagtgcactggatatgcaatgttgggaaagatggggattcacagattcacgtttgagttgtctgttgatggcgtggttttctacaaaggaagcacttcctttggatggttcactccagaggtgtttgctcagcaagctggacttgacaatgggaaaaagacggagccttggtgcaaaactaacaacacgagtgtgagaagagttgaaatcgcatcagccaaaggcaaagaacagctgactgagaaacttccagatgcaactaatgctcaagttctcagaaggtcagaacagtgtgagtatttggattacctcaacattgctcctgattctgggctgcatgggaaaggatatgcgcatggacacaaagatgttaacccacaagactggttcttctcttgtcacttttggtttgatcctgtgatgcctggatctttgggaattgagtcaatgttccagctcattgaggcatttgcggtggaccagaacataccgggagaatacaatgtgagcaatccgacctttgcccatgcccctggaaaaacggcgtggaagtaccgtggtcaattgacaccaaagaaccgtgcgatggactgtgaggtgcacatagtttcaatcacagcctctcctgaaaatggaggctacgttgacatagtggcagatggagcactttgggttgatggtctccgtgtgtatgaagccaaagaactcagagttcgtgttgtcagtgcaaaacctcaagccattccggatgttcaacaacagccacccagcgcaaaagcggaccctgggaaaactggagttgcactcagtccgactcagttgagagatgtcctgcttgaagtggacaatccattgtatcttggtgttgaaaactccaatttggtgcagtttgaatccaaacctgcaacttcttcaaggattgtcagtatcaaaccatgctccataagtgatcttggtgacaagtccttcatggaaacgtacaatgtgtcagcacctctgtacactggagcaatggccaagggaattgcgtctgcggaccttgtcattgctgctgggaagaggaagatattgggttcttttggagcgggtgggcttccaatgcaccatgtgagggcagctttggagaagatacaagcggctctgcctcaaggaccatatgctgtgaacctcattcattcaccttttgacagcaacttggaaaaggggaatgttgatctcttcctcgaaaagggcgttactgtggtggaggcttctgcattcatgaccctcactccccaagttgttcgttaccgtgcagccggactctcaaggaacgctgatgggagtgtcaacatcagaaaccgtatcattggaaaagtgtccagaacagaactcgccgaaatgttcatcagaccggctccggaacacctccttgagaaactcatagcttctggtgagataacacaagaacaagccgaacttgcccgtcgtgttcctgtcgcagacgacatcgctgttgaagctgattctggtggtcacactgacaaccgtcccatccacgtcatcttgcctttgatcatcaaccttaggaacagactgcacagagagtgtggttatcctgcgcaccttagagtcagagttggagctggaggcggtgttggctgcccacaagctgctgcggctgccctcacaatgggagctgccttcatagtgactgggactgtcaatcaagttgctaaacagtccgggacatgtgacaacgtgagaaaacaactcagtcaagccacctacagtgacatttgcatggctccagcagctgatatgtttgaggaaggtgtgaaactccaagttctcaagaagggaacaatgttcccatcaagagctaacaaattgtacgaactcttttgcaagtacgactctttcgattcaatgcctcctgctgaacttgaaaggatcgagaagaggatcttcaagagggcacttcaagaggtctgggaagagaccaaggacttttacatcaatggtttgaagaatccagagaagatacagagagcggaacatgaccccaaactcaagatgtctttgtgtttcagatggtatcttggtcttgcatcacgttgggccaacatgggtgctcctgatcgtgtcatggactatcaagtctggtgtggtccagccattggagccttcaatgacttcatcaaaggaacatatcttgatcctgctgtctctaatgagtacccatgtgttgtccagatcaaccttcagattttgcgtggtgcatgttacctgaggcgtcttaatgctctgagaaatgatccgaggattgatcttgagactgaagatgctgcctttgtctatgagccaacgaatgcgctttgagtagttagcttaatcacttaggtcacccagtccaagcccggcctagcacgatgatcatgagtgttgctattgatgtatgttaatactatacacagtcatcgtgtgtgttttataaaactgtaagcttaggatgtttgaggctaatgtaattagcactacaccgtaataaatgagaggtttactttatgttttaataatgttcttacccttgctgctctctaaactgtaatggcgtacggttagctaaactaaagtaaaaatcgattcgcttgagtaaaattagtgaccgggaaagatcatcgactactactgctcagagatgtaatcggtaattaagacttcaagctcaataattaattaggagtaaatctggcttcgaatttttaaattgtcaacttccaaagaaggattggcaagactcaatctcaattgcccaacaaacatatggctctttacaaatttggaatctctttttgatggcaagaacgtcgtaattcctctgtcgatctcatgtaattaccaaactcatctacttattactttctttatatgcacttactgatgcggccgcttaattaatcacgagtggatgactgtcacgactgactcatgactgactactagtgctagcctcgaggtcgacacaactttgtataataaagttgtctagacctaggcgagtcatgagtcgtgacatgacgtcatgctcatcagactgcggccgcagcttatagtaaagatttttttgttaataaaatgaaagttaatatttatggatttatttgaacatatttacaagtttttgttaataaatttatttacagaagtgttaaatttgaaaatgtgttaaatgagagttaatatttatggatataatattactttatttaaaaataaaatgaatttatattaaaatatgatttggtaaaagatattataaagaggaacttggatgagaaagacgacgatgggcaaaagttgcatggcacaccgcttttgttcagtaacatctgcactgtggcgcctttttcacactcaccatgcatgctgccacgtcagctttcacactatgacaccactggccatacacgttgccacctcagctttctcctcttctcactatgacacgactggccatgcatgcatgcatgctgccacctcagctcccgcctcttcacccgtgtctttctctcatgtcgcagtgctgcgtgccaacctcttctctctataaatagagagaagagaatgatggttaaactcaaaccaaaacaagaaaacatacacaaatagcaaaacggatccacaaccaacctaccatggctcccactcccgacgccaccgcgcctctgaacaagccgagcgactatgccgtctaccacgaggaagacggccccttctggaccgccgattccagcggcgtctcgcgcgtgaactttagcgagaccggcgtgggatccgagggcgtcatccctgcgctcacgctcatcgacgtcttcgagagggccgtcaagcgcggcggaaacaggatcgccttccgcacggaaaacatgcccacgctccgccgcggcgaagaggccccggacgcgctgccgctcaaggactggaagtcctggtcctggaaacagtacaaggccgacgtccaccgcatcgccagggctctcatggacctcggcgttgagcagcatgacgccgtctccatttttggctttaactcgcccgaatggtttctcagtgccgtcggcgccgtgcacgcaggtgccaagattgccggcatttacccctcagacacgcccgcccaggtccagtacaaggccttccacagtgacaccgctgttgccgttgtcgaaaacgagcagtgcttcaagaagttcgccgaggtcgtcgaggaccttccttacctcaaggccattgtttgctgggactatgaagccacagacatcacgcgcgaggacggctccgtcgtcgaggtcctcacctttgccgagttcctcaagcgcggcgacaccgtcgaggcggccgcccttgacgagcgcatctccaagatcgagcccaccatgtgcgctgcccttatttacaccagcggtactaccggccgccccaaggccgttatgatttcgcacgacaaccttgttttcgaggccagcgccgtcgtccccaacctcggaggagcctgtacgaccactgctgaggagcgcattctctcgtacctgcctctctcgcacgtcgctggtatgatggttgatattattgcccccatcattgccaccgccttccacaagggccgcatctgcgtctgctttgctcgcccgtacgatttgcgcaccggcacgctgggccagcgcctcaacgccgtggagcccaccatcttccttggcgtgccccgtgtgtgggaaaagattcaggaaaagctcatggccgtcggtgccaaaaccaccggcctcaagaagaagctctctacggccgccaagaagcgtggtcttgaattccaggaggagcagcaaatcggccgctccggtgccaaccctggctttggcccccttggcatctacaagaagctcctcggcctcatcaagggcaagctgggcctcaccaagtgcaagtttgcctttgctggtgccgcgcccatgacccgtgagacccttcagtactttggcgcgctgaacatcaacattaacgaggtctacggcatgtccgagtgctccggtgccgccacctggtccacggacaaggcccacgagtggggcactgttggctacgagatgcccagttgcgaggtccgcgtcttcaagattgccgaggacggtaccaagaccgagtgcccgcgcgccgccgacattatgcatgctaccgaggaggagcagggcgaagtttgcttccgcggccgtaacatcatgatgggctaccttgccaaccccaagcttggcgacgaccacgttgccgagatcgaggagaagaacgctgccgctatcgactccgagggctggctccacagtggtgataagggcgccatttctacccgcggcatgctcaagatcacgggccgctacaaggagctcatcatcggcgccggtggcgagaacgtggcgcccgtccctattgaggacgccatcaaggcgcgcatgccttttgtttccaacgccatgatggtcggagataagcgcaagttcatggctgtcctccttaccctcaagacggttggcgccacgggcgagcttcccggtacgaacaagctcatgggcgctgccgccgactatggtgagaccatcgaggacgcctgcgacaacgaggcgctcattgaggagatcacgcagcagctcaaggagatcggtgatgatggcgatgtcacgccctcgaacgcggctcgcatccaaaagttcaccattctcccgctcgacttttccgtctccacggacgagctcacggccacgctcaagctcaagcgctccgtggtcgcagacaagtacgaagacatcatcgaggccttttacgagtccaagagcgtttttgtgccgtactcgaccgttggcgcctacgccacgggcggcccggtcgacgactccgttgtcgatggctccttcaagggcgactttagcatgattggcgacgatgatccggatcttcaaaacgtcgatgtcctcgaggcgattgacgaggacaattaaatttccagtccaagcccggcctagcacgatgatcatgagtgttgctattgatgtatgttaatactatacacagtcatcgtgtgtgttttataaaactgtaagcttaggatgtttgaggctaatgtaattagcactacaccgtaataaatgagaggtttactttatgttttaataatgttcttacccttgctgctctctaaactgtaatggcgtacggttagctaaactaaagtaaaaatcgattcgcttgagtaaaattagtgaccgggaaagatcatcgactactactgctcagagatgtaatcggtaattaagacttcaagctcaataattaattaggagtaaatctggcttcgaatttttaaattgtcaacttccaaagaaggattggcaagactcaatctcaattgcccaacaaacatatggctctttacaaatttggaatctctttttgatggcaagaacgtcgtaattcctctgtcgatctcatgtaattaccaaactcatctacttattactttctttatatgcacttactgatgcggccgcttaattaatctgatcatggatgctacgtcacggcagtacaggactatccctaggagctgtgctgggtaactcacatgagtcactggtcacatcagcggccgcagcttatagtaaagatttttttgttaataaaatgaaagttaatatttatggatttatttgaacatatttacaagtttttgttaataaatttatttacagaagtgttaaatttgaaaatgtgttaaatgagagttaatatttatggatataatattactttatttaaaaataaaatgaatttatattaaaatatgatttggtaaaagatattataaagaggaacttggatgagaaagacgacgatgggcaaaagttgcatggcacaccgcttttgttcagtaacatctgcactgtggcgcctttttcacactcaccatgcatgctgccacgtcagctttcacactatgacaccactggccatacacgttgccacctcagctttctcctcttctcactatgacacgactggccatgcatgcatgcatgctgccacctcagctcccgcctcttcacccgtgtctttctctcatgtcgcagtgctgcgtgccaacctcttctctctataaatagagagaagagaatgatggttaaactcaaaccaaaacaagaaaacatacacaaatagcaaaacggatccacaaccaaaaatgcttcagcacacttggcttccgaagcctcccaatctgaccctcttgtcagatgaggttcatctctggaggattcctcttgaccagcctgagtcacaacttcaagaccttgctgccaccctgagcagtgatgaattggcgagggcaaacagattctactttccagaacacagaaggcgtttcactgctgggagaggcatcctcagatccatcttgggtggatacttgggagtggaaccgggtcaagtcaagtttgattatgagtcccgtgggaaaccgatccttggtgacagatttgctgagagtggactcctgttcaacttgtctcacagccagaaccttgccttgtgtgctgtcaactacacgcgtcaaataggcattgatcttgaatatctgcgtccaacatctgacttggagtctcttgcaaagaggttctttctcccaagagaatatgaactcttgaggtcactccctgatgagcagaaacagaagattttctttcgttactggacttgcaaagaggcttatctcaaagcaacgggagatggaatagccaaacttgaagagatcgagatagcactcaccccaacagaacctgccaagctccaaacagctcctgcgtggtctctgttggagcttgtgccagatgacaattgtgttgcagctgtggctgttgcgggttttggttggcagcccaagttctggcattactgagtagttagcttaatcacttaggtcacccagtccaagcccggcctagcacgatgatcatgagtgttgctattgatgtatgttaatactatacacagtcatcgtgtgtgttttataaaactgtaagcttaggatgtttgaggctaatgtaattagcactacaccgtaataaatgagaggtttactttatgttttaataatgttcttacccttgctgctctctaaactgtaatggcgtacggttagctaaactaaagtaaaaatcgattcgcttgagtaaaattagtgaccgggaaagatcatcgactactactgctcagagatgtaatcggtaattaagacttcaagctcaataattaattaggagtaaatctggcttcgaatttttaaattgtcaacttccaaagaaggattggcaagactcaatctcaattgcccaacaaacatatggctctttacaaatttggaatctctttttgatggcaagaacgtcgtaattcctctgtcgatctcatgtaattaccaaactcatctacttattactttctttatatgcacttactgatgcggccgcttaattaactactgtcactgaggccgtagacgagtacggactgatctaactagtgctagcctcgaggtcgacacccagctttcttgtacaaagtggttgcggccgcttaattaaatttaaattcaattaatgcaatcttgattttcaacaacgaaggtaatggcgtaaaagaaaaaatgtatgttattgtattgatctttcatgatgttgaagcgtgccataatatgatgatgtataattaaaatattaactgtcgcattttattgaaatggcactgttatttcaaccatatctttgattctgttacatgacacgactgcaagaagtaaataatagacgccgttgttaaagaattgctatcatatgtgcctaactagagggaatttgagcgtcagacctaatcaaatattacaaaatatctcactctgtcgccagcaatggtgtaatcagcgcagacaaatggcgtaaagatcgcggaaaaacctccccgagtggcatgatagctgcctctgtattgctgatttagtcagccttatttgacttaagggtgccctcgttagtgacaaattgctttcaaggagacagccatgccccacactttgttgaaaaacaaattgcctttggggagacggtaaagccagttgctcttcaataaggaatgtcgaggaggcaatgtaaccgcctctggtagtacacttctctaatccaaaaatcaatttgtattcaagataccgcaaaaaacttatggtttaaaccctgcaggactagtccagaaggtaattatccaagatgtagcatcaagaatccaatgtttacgggaaaaactatggaagtattatgtaagctcagcaagaagcagatcaatatgcggcacatatgcaacctatgttcaaaaatgaagaatgtacagatacaagatcctatactgccagaatacgaagaagaatacgtagaaattgaaaaagaagaaccaggcgaagaaaagaatcttgaagacgtaagcactgacgacaacaatgaaaagaagaagataaggtcggtgattgtgaaagagacatagaggacacatgtaaggtggaaaatgtaagggcggaaagtaaccttatcacaaaggaatcttatcccccactacttatccttttatatttttccgtgtcatttttgcccttgagttttcctatataaggaaccaagttcggcatttgtgaaaacaagaaaaaatttggtgtaagctattttctttgaagtactgaggatacaacttcagagaaatttgtaagtttgtaggtaccagatctggatcccaaaccatgtctccggagaggagaccagttgagattaggccagctacagcagctgatatggccgcggtttgtgatatcgttaaccattacattgagacgtctacagtgaactttaggacagagccacaaacaccacaagagtggattgatgatctagagaggttgcaagatagatacccttggttggttgctgaggttgagggtgttgtggctggtattgcttacgctgggccctggaaggctaggaacgcttacgattggacagttgagagtactgtttacgtgtcacataggcatcaaaggttgggcctaggatctacattgtacacacatttgcttaagtctatggaggcgcaaggttttaagtctgtggttgctgttataggccttccaaacgatccatctgttaggttgcatgaggctttgggatacacagcccggggtacattgcgcgcagctggatacaagcatggtggatggcatgatgttggtttttggcaaagggattttgagttgccagctcctccaaggccagttaggccagttacccaaatctgagtagttagcttaatcacctagagctcgatcggcggcaatagcttcttagcgccatcccgggttgatcctatctgtgttgaaatagttgcggtgggcaaggctctctttcagaaagacaggcggccaaaggaacccaaggtgaggtgggctatggctctcagttccttgtggaagcgcttggtctaaggtgcagaggtgttagcgggatgaagcaaaagtgtccgattgtaacaagatatgttgatcctacgtaaggatattaaagtatgtattcatcactaatataatcagtgtattccaatatgtactacgatttccaatgtctttattgtcgccgtatgtaatcggcgtcacaaaataatccccggtgactttcttttaatccaggatgaaataatatgttattataatttttgcgatttggtccgttataggaattgaagtgtgcttgaggtcggtcgccaccactcccatttcataattttacatgtatttgaaaaataaaaatttatggtattcaatttaaacacgtatacttgtaaagaatgatatcttgaaagaaatatagtttaaatatttattgataaaataacaagtcaggtattatagtccaagcaaaaacataaatttattgatgcaagtttaaattcagaaatatttcaataactgattatatcagctggtacattgccgtagatgaaagactgagtgcgatattatggtgtaatacataggaattcgtttaaacgatctgcgtctaattttcggtccaacttgcacaggaaagacgtcgaccgcggtagctcttgcccagcagactgggcttccagtcctttcgctcgatcgggtccaatgttgtcctcagctgtgaaccggaagcggacgaccaacagtggaagaactgaaaggaacgagccgtctataccttgatgatcggcctctggtgaagggtatcatcgcagccaagcaagctcatgaaaggctgatgggggaggtgtataattatgaggcccacggcgggcttattctttagggaggatctatctcgttgctcaagtgcatggcgcaaagcagttattggagtgcggattttcgttggcatattattcgccacgagttagcagacgaagagaccttcatgaacgtggccaaggccagagttaagcagatgttacgccctgctgcaggcctttctattatccaatagttggttgatctttggaaagagcctcggctgaggcccatactgaaagagatcgatggatatcgatatgccatgttgtttgctagccagaaccagatcacatccgatatgctattgcagcttgacgcagatatggaggataagttgattcatgggatcgctcaggagtagctcatccatgcacgccgacaagaacagaaattccgtcgagttaacgcagccgcttacgacggattcgaaggtcatccattcggaatgtattagtttgcaccagctccgcgtcacacctgtcttcatttgaataagatgttagcaattgtttttagctttgtcttgttgtggcagggcggcaagtgcttcagacatcattctgttttcaaattttatgctggagaacagcttcttaattcctttggaaataatagactgcgtcttaaaattcagatgtctggatatagatatgattgtaaaataacctatttaagtgtcatttagaacataagttttatgaatgttcttccattttcgtcatcgaacgaataagagtaaatacaccttttttaacattacaaataagttcttatacgttgtttatacaccgggaatcatttccattattttcgcgcaaaagtcacggatattcgtgaaagcgacataaactgcgaaatttgcggggagtgtcttgagtttgcctcgaggctagcgcatgcacatagacacacacatcatctcattgatgcttggtaataattgtcattagattgtttttatgcatagatgcactcgaaatcagccaattttagacaagtatcaaacggatgtgacttcagtacattaaaaacgtccgcaatgtgttattaagttgtctaagcgtcaatttgatttacaattgaatatatcctgccccagccagccaacagctcgatttacaattgaatatatcctgccggccggcccacgcgtgtcgaggaattctgatctggcccccatttggacgtgaatgtagacacgtcgaaataaagatttccgaattagaataatttgtttattgctttcgcctataaatacgacggatcgtaatttgtcgttttatcaaaatgtactttcattttataataacgctgcggacatctacatttttgaattgaaaaaaaattggtaattactctttctttttctccatattgaccatcatactcattgctgatccatgtagatttcccggacatgaagccatttacaattgaatatatcctgccgccgctgccgctttgcacccggtggagcttgcatgttggtttctacgcagaactgagccggttaggcagataatttccattgagaactgagccatgtgcaccttccccccaacacggtgagcgacggggcaacggagtgatccacatgggacttttaaacatcatccgtcggatggcgttgcgagagaagcagtcgatccgtgagatcagccgacgcaccgggcaggcgcgcaacacgatcgcaaagtatttgaacgcaggtacaatcgagccgacgttcacgcggaacgaccaagcaagcttggctgccatttttggggtgaggccgttcgcggccgaggggcgcagcccctggggggatgggaggcccgcgttagcgggccgggagggttcgagaagggggggcaccccccttcggcgtgcgcggtcacgcgcacagggcgcagccctggttaaaaacaaggtttataaatattggtttaaaagcaggttaaaagacaggttagcggtggccgaaaaacgggcggaaacccttgcaaatgctggattttctgcctgtggacagcccctcaaatgtcaataggtgcgcccctcatctgtcagcactctgcccctcaagtgtcaaggatcgcgcccctcatctgtcagtagtcgcgcccctcaagtgtcaataccgcagggcacttatccccaggcttgtccacatcatctgtgggaaactcgcgtaaaatcaggcgttttcgccgatttgcgaggctggccagctccacgtcgccggccgaaatcgagcctgcccctcatctgtcaacgccgcgccgggtgagtcggcccctcaagtgtcaacgtccgcccctcatctgtcagtgagggccaagttttccgcgaggtatccacaacgccggcggccgcggtgtctcgcacacggcttcgacggcgtttctggcgcgtttgcagggccatagacggccgccagcccagcggcgagggcaaccagcccggtgagcgtcggaaagggtcgacggatcttttccgctgcataaccctgcttcggggtcattatagcgattttttcggtatatccatcctttttcgcacgatatacaggattttgccaaagggttcgtgtagactttccttggtgtatccaacggcgtcagccgggcaggataggtgaagtaggcccacccgcgagcgggtgttccttcttcactgtcccttattcgcacctggcggtgctcaacgggaatcctgctctgcgaggctggccggctaccgccggcgtaacagatgagggcaagcggatggctgatgaaaccaagccaaccaggaagggcagcccacctatcaaggtgtactgccttccagacgaacgaagagcgattgaggaaaaggcggcggcggccggcatgagcctgtcggcctacctgctggccgtcggccagggctacaaaatcacgggcgtcgtggactatgagcacgtccgcgagctggcccgcatcaatggcgacctgggccgcctgggcggcctgctgaaactctggctcaccgacgacccgcgcacggcgcggttcggtgatgccacgatcctcgccctgctggcgaagatcgaagagaagcaggacgagcttggcaaggtcatgatgggcgtggtccgcccgagggcagagccatgacttttttagccgctaaaacggccggggggtgcgcgtgattgccaagcacgtccccatgcgctccatcaagaagagcgacttcgcggagctggtattcgtgcagggcaagattcggaataccaagtacgagaaggacggccagacggtctacgggaccgacttcattgccgataaggtggattatctggacaccaaggcaccaggcgggtcaaatcaggaataagggcacattgccccggcgtgagtcggggcaatcccgcaaggagggtgaatgaatcggacgtttgaccggaaggcatacaggcaagaactgatcgacgcggggttttccgccgaggatgccgaaaccatcgcaagccgcaccgtcatgcgtgcgccccgcgaaaccttccagtccgtcggctcgatggtccagcaagctacggccaagatcgagcgcgacagcgtgcaactggctccccctgccctgcccgcgccatcggccgccgtggagcgttcgcgtcgtctcgaacaggaggcggcaggtttggcgaagtcgatgaccatcgacacgcgaggaactatgacgaccaagaagcgaaaaaccgccggcgaggacctggcaaaacaggtcagcgaggccaagcaggccgcgttgctgaaacacacgaagcagcagatcaaggaaatgcagctttccttgttcgatattgcgccgtggccggacacgatgcgagcgatgccaaacgacacggcccgctctgccctgttcaccacgcgcaacaagaaaatcccgcgcgaggcgctgcaaaacaaggtcattttccacgtcaacaaggacgtgaagatcacctacaccggcgtcgagctgcgggccgacgatgacgaactggtgtggcagcaggtgttggagtacgcgaagcgcacccctatcggcgagccgatcaccttcacgttctacgagctttgccaggacctgggctggtcgatcaatggccggtattacacgaaggccgaggaatgcctgtcgcgcctacaggcgacggcgatgggcttcacgtccgaccgcgttgggcacctggaatcggtgtcgctgctgcaccgcttccgcgtcctggaccgtggcaagaaaacgtcccgttgccaggtcctgatcgacgaggaaatcgtcgtgctgtttgctggcgaccactacacgaaattcatatgggagaagtaccgcaagctgtcgccgacggcccgacggatgttcgactatttcagctcgcaccgggagccgtacccgctcaagctggaaaccttccgcctcatgtgcggatcggattccacccgcgtgaagaagtggcgcgagcaggtcggcgaagcctgcgaagagttgcgaggcagcggcctggtggaacacgcctgggtcaatgatgacctggtgcattgcaaacgctagggccttgtggggtcagttccggctgggggttcagcagccagcgctttactggcatttcaggaacaagcgggcactgctcgacgcacttgcttcgctcagtatcgctcgggacgcacggcgcgctctacgaactgccgataaacagaggattaaaattgacaattgtgattaaggctcagattcgacggcttggagcggccgacgtgcaggatttccgcgagatccgattgtcggccctgaagaaagctccagagatgttcgggtccgtttacgagcacgaggagaaaaagcccatggaggcgttcgctgaacggttgcgagatgccgtggcattcggcgcctacatcgacggcgagatcattgggctgtcggtcttcaaacaggaggacggccccaaggacgctcacaaggcgcatctgtccggcgttttcgtggagcccgaacagcgaggccgaggggtcgccggtatgctgctgcgggcgttgccggcgggtttattgctcgtgatgatcgtccgacagattccaacgggaatctggtggatgcgcatcttcatcctcggcgcacttaatatttcgctattctggagcttgttgtttatttcggtctaccgcctgccgggcggggtcgcggcgacggtaggcgctgtgcagccgctgatggtcgtgttcatctctgccgctctgctaggtagcccgatacgattgatggcggtcctgggggctatttgcggaactgcgggcgtggcgctgttggtgttgacaccaaacgcagcgctagatcctgtcggcgtcgcagcgggcctggcgggggcggtttccatggcgttcggaaccgtgctgacccgcaagtggcaacctcccgtgcctctgctcacctttaccgcctggcaactggcggccggaggacttctgctcgttccagtagctttagtgtttgatccgccaatcccgatgcctacaggaaccaatgttctcggcctggcgtggctcggcctgatcggagcgggtttaacctacttcctttggttccgggggatctcgcgactcgaacctacagttgtttccttactgggctttctcagcccccgagcgcttagtgggaatttgtaccccttatcgaaccgggagcacaggatgacgcctaacaattcattcaagccgacaccgcttcgcggcgcggcttaattcaggagttaaacatcatgagggaagcggtgatcgccgaagtatcgactcaactatcagaggtagttggcgtcatcgagcgccatctcgaaccgacgttgctggccgtacatttgtacggctccgcagtggatggcggcctgaagccacacagtgatattgatttgctggttacggtgaccgtaaggcttgatgaaacaacgcggcgagctttgatcaacgaccttttggaaacttcggcttcccctggagagagcgagattctccgcgctgtagaagtcaccattgttgtgcacgacgacatcattccgtggcgttatccagctaagcgcgaactgcaatttggagaatggcagcgcaatgacattcttgcaggtatcttcgagccagccacgatcgacattgatctggctatcttgctgacaaaagcaagagaacatagcgttgccttggtaggtccagcggcggaggaactctttgatccggttcctgaacaggatctatttgaggcgctaaatgaaaccttaacgctatggaactcgccgcccgactgggctggcgatgagcgaaatgtagtgcttacgttgtcccgcatttggtacagcgcagtaaccggcaaaatcgcgccgaaggatgtcgctgccgactgggcaatggagcgcctgccggcccagtatcagcccgtcatacttgaagctaggcaggcttatcttggacaagaagatcgcttggcctcgcgcgcagatcagttggaagaatttgttcactacgtgaaaggcgagatcaccaaggtagtcggcaaataatgtctaacaattcgttcaagccgacgccgcttcgcggcgcggcttaactcaagcgttagagagctggggaagactatgcgcgatctgttgaaggtggttctaagcctcgtcttgcgatggcatttcgatccattcccattccgcgctcaagatggcttcccctcggcagttcatcagggctaaatcaatctagccgacttgtccggtgaaatgggctgcactccaacagaaacaatcaaacaaacatacacagcgacttattcacacgagctca

SEQ ID NO: 39 - DNA, 38760 bp, Artificial sequence
  plasmid pDAB101477
aattacaacggtatatatcctgccagtcagcatcatcacaccaaaagttaggcccgaatagtttgaaattagaaagctcgcaattgaggtctacaggccaaattcgctcttagccgtacaatattactcaccggatcctaaccggtttaattaaggcgcgccatgcccgggcaagcggccgcacaagtttgtacaaaaaagcaggcttctagacctaggtggagtcatcacgcagactatctcagcatgtgcgtagcacgcggccgcagcttatagtaaagatttttttgttaataaaatgaaagttaatatttatggatttatttgaacatatttacaagtttttgttaataaatttatttacagaagtgttaaatttgaaaatgtgttaaatgagagttaatatttatggatataatattactttatttaaaaataaaatgaatttatattaaaatatgatttggtaaaagatattataaagaggaacttggatgagaaagacgacgatgggcaaaagttgcatggcacaccgcttttgttcagtaacatctgcactgtggcgcctttttcacactcaccatgcatgctgccacgtcagctttcacactatgacaccactggccatacacgttgccacctcagctttctcctcttctcactatgacacgactggccatgcatgcatgcatgctgccacctcagctcccgcctcttcacccgtgtctttctctcatgtcgcagtgctgcgtgccaacctcttctctctataaatagagagaagagaatgatggttaaactcaaaccaaaacaagaaaacatacacaaatagcaaaacggatccacaaccaaaaatggcagcgaggctgcaagagcagaaaggaggtgagatggacacgaggattgcgatcataggcatgagcgccatacttccttgtggaaccacggtgagagagtcatgggagaccataagggctggcattgattgcctgtctgatcttcctgaggatcgtgttgatgtgactgcgtactttgacccagtcaagaccacaaaggacaaaatctactgcaagagaggaggtttcattcctgagtatgactttgatgcgcgtgagtttggtctcaacatgttccagatggaagattctgatgcgaatcagaccatctcacttctcaaggtcaaagaagcacttcaagatgctgggattgatgcacttggaaaggagaagaaaaacataggatgcgtgcttggcattggaggtggacagaagagttcacatgagttctacagcagactcaactatgtggttgtggagaaagtcttgagaaagatggggatgccagaggaagatgtcaaagtggctgtggagaagtacaaagcgaacttcccagaatggagacttgactctttccctggattccttgggaatgtcactgctggcagatgcaccaacacattcaacttggatggcatgaactgcgttgtggatgctgcatgtgcaagctccttgatagcagtcaaggttgcgattgatgaactgctctatggtgactgcgacatgatggtcactggtgcaacctgcacagacaactccattgggatgtacatggctttctcaaagacacctgtgttcagcacggacccaagtgtgagagcgtatgatgagaaaacgaaagggatgctcattggtgagggatcagccatgttggtgctcaaacgttatgcagatgcagtgagggatggtgatgagattcatgctgtgattcgtggttgtgcaagctcaagtgatggcaaagcagctggcatctacactcccacaatcagtggtcaagaggaagccttgagacgtgcatacaatcgtgcctgcgttgaccctgccactgtcactttggttgagggtcatgggactggcactccagttggagataggattgagttgactgcgttgaggaacttgtttgacaaagcgtatggtgaagggaacacagagaaagttgcagttggaagtatcaagtccagtattggtcatttgaaggctgttgctggtcttgctggaatgatcaaggtcatcatggctctcaaacacaagactttgcctggaacgatcaatgtggacaatccacccaatctctatgacaacactcccatcaatgagtcatccctctacatcaacacgatgaacagaccctggttccctccacctggtgttccgagacgtgctggaatatccagctttggctttggaggtgccaactaccatgcagtgttggaagaggctgaaccagagcacacgacagcgtacagactcaacaaacgtccacaaccggtgttgatgatggctgcaactcctgctgcgttgcagagcctttgtgaagctcagctgaaagagtttgaagctgcgatcaaggagaatgagacagtcaagaatactgcctacatcaagtgtgtcaagtttggagaacagttcaagttccctgggagcatacctgcgaccaatgcgagactgggattcttggtcaaagatgcggaggatgcgtgctccacgcttcgtgctatatgtgctcagtttgccaaagatgtgaccaaagaagcgtggaggcttccgagagaaggagtttctttccgtgccaaaggcattgccaccaatggtgctgttgctgcactcttctctggacaaggtgctcagtacacacacatgttcagtgaagttgcgatgaactggcctcagttcagacagtccattgctgcaatggacgctgcacagtccaaggttgctggaagtgacaaagactttgaaagagtctctcaagtcctgtacccaaggaaaccgtacgaacgtgagccagaacaagatcacaagaaaatctcactcacagcatacagccagccgtcaaccctggcatgtgctcttggtgcctttgagattttcaaggaagctggattcactccagactttgcagctggacacagcttgggtgagtttgctgcgctctatgcagctggttgtgttgacagagatgagttgtttgaacttgtttgcagaagggcaaggatcatgggaggcaaagatgcacctgccacacccaaaggttgcatggcagctgtcataggacccaacgcagagaacatcaaggttcaagctgccaacgtctggcttggaaactcaaactctccgtctcagactgtcattactgggtctgttgaagggattcaagctgaaagtgccagattgcagaaggaagggttcagagttgtgcctcttgcttgtgagtctgccttccattctccacagatggaaaatgccagctcagctttcaaagatgtcatatccaaggtttccttccgtacacccaaagcagaaacaaagctcttcagcaatgtttctggagagacctatccgacggatgccagagagatgctcactcaacacatgacctcatctgtgaagttcctgacccaagtgaggaacatgcaccaagctggtgcgagaatctttgttgagtttggaccgaaacaagttctcagcaaacttgtttctgaaaccctcaaagatgacccgtctgttgtcacagtgtctgtgaacccagcttctggcacggactctgacatacagttgagggatgctgcagttcagctggttgtggctggtgtcaatcttcaagggtttgacaagtgggatgctcctgatgccacgaggatgcaagccatcaagaaaaagagaaccacactcagactttcagctgccacctatgtcagtgacaagaccaagaaagtgagggatgctgccatgaacgacggaagatgtgtcacatacctcaagggtgctgcaccactcatcaaggctcctgaacctgtggttgacgaagctgccaagagggaggctgaaaggcttcagaaggagcttcaagacgctcagaggcagcttgacgacgccaaacgtgcagctgcagaagccaactccaaacttgctgctgccaaggaggaagccaagactgctgcagcttcagccaagcctgcagttgacactgctgttgtggagaaacatcgtgccatcctcaagtccatgctggctgagctggatggttatggaagtgttgatgcttcttcccttcagcaacagcaacagcaacagactgctccggcgcctgttaaagccgctgcccctgccgctcccgttgcaagtgctcctgctcccgccgtgtccaacgagttgcttgagaaagctgagacagttgtgatggaggttctcgctgccaagactggatacgaaacagacatgattgaggcggacatggagcttgagactgagttgggaattgacagcatcaagagggttgaaattctttctgaagtccaagctatgcttaacgttgaggcgaaagatgttgatgctctctctaggacgagaacagtgggtgaagttgtcaacgctatgaaggcagaaatcgctggttcttccgctccggcgccggcagctgccgcacctgcaccggctaaagcggctccagctgcagctgcaccagctgtttctaatgagctgctcgaaaaggcagaaactgttgtgatggaagtccttgctgccaaaactggctacgaaactgacatgatagaatcagacatggagcttgagacggagcttggaattgattccatcaagcgtgtggaaatcctcagtgaagtccaagccatgctcaatgtggaagctaaggatgtggatgctctctcaaggaccagaactgtcggtgaggttgtcaatgccatgaaggctgagatagctggaggctccgctcctgcgccggccgctgccgctcctggtcccgctgccgcggctccagctccagctgcagccgctccggccgtctcaaacgaactccttgaaaaagctgagaccgtcgtgatggaggtcttggcagctaaaaccggctatgagactgacatgattgagtctgacatggaattggagacagaacttgggatagacagcatcaaacgtgttgaaatcctcagtgaggtccaagctatgctgaacgtggaagcgaaggatgttgatgctctgtccagaacgaggaccgttggtgaggttgtggatgccatgaaggctgaaattgctggagggtctgcgcccgcgccagctgcagccgctcctgcacccgcagccgcggcacctgctccagctgcacctgcacctgccgtttcttcagaactcttggagaaggctgagacggttgtgatggaggttttggctgcaaagactggctatgagaccgacatgattgaatctgatatggaattggagacagagcttgggatcgattccatcaaaagagtggagatcctgagtgaagtccaagccatgctcaatgttgaagctaaggatgttgatgcactttcaagaacaaggacagtgggtgaggttgtggatgccatgaaggcggagattgctggagggagcgcgcctgcgccagctgccgcggcacctgcaccggcagccgcagctccagctccagctgcaccagcaccggccgcgcccgcgccagctgtttcatccgaactcctggaaaaggccgagacggttgtgatggaggtgctcgcagctaagactggttacgagaccgacatgattgaaagtgacatggagcttgaaaccgagttgggaatagatagcatcaaacgtgttgaaatcttgtctgaggtccaagctatgttgaacgtggaggcaaaagatgtcgatgcgctttcaagaaccagaacagtcggtgaggtcgtggacgccatgaaggctgaaattgccggaagctctgctagtgcgccagctgcagccgcacctgcacctgctgccgcggcacctgctccagctgcagccgctcctgccgtcagcaatgagttgctggagaaagccgaaacagttgtgatggaagtccttgctgcaaaaactggttacgaaacggacatgattgagtcagacatggaattggagaccgaacttggaatagattccatcaagagagtggagatcctctctgaggtgcaagccatgctcaacgttgaggctaaagatgttgatgcactcagtaggacaagaactgtgggggaagttgtcgatgcgatgaaggctgagattgctggaggctctgctcctgcgccggcagctgccgcacctgcacccgcagccgcggcaccagctgtcagcaacgaattgcttgagaaggctgaaacagttgtcatggaagtgctggctgcaaaaaccggctatgagactgacatgattgagtctgacatggaacttgagacggaattgggcattgacagcatcaagcgtgttgagatcctcagtgaagtccaagcaatgctcaatgtggaggctaaggatgtggatgccctctcaaggaccagaacagttggtgaggtcgttgatgcgatgaaggcggagatcgctggaagttccgcgcctgcgccagctgcagccgctcctgcacccgcagccgcggcaccggctccagctgcagccgcaccggccgtctcctcagaactcctggaaaaggctgagacagttgtgatggaagtccttgctgcgaaaactggctatgagaccgacatgattgaatctgacatggaactggagaccgagcttggaattgactccatcaaacgtgttgaaatcctctctgaggttcaagcgatgttgaatgtggaggccaaagatgttgatgctctttccagaacaaggacggtgggagaggtggttgatgccatgaaggctgagatagctgggggttctgctcctgcgccagctgcagccgctcctgctcccgctgccgcggcaccagctgtcagcaacgaactccttgaaaaagctgaaactgttgtgatggaggttttggctgcaaagactggatacgagactgacatgatagagtcagacatggagttggaaacagagcttgggattgatagcatcaagcgtgtggaaatcctttctgaggttcaagccatgctgaacgttgaggccaaagatgtcgatgctttgtcaaggaccagaacggttggagaagtggtcgatgccatgaaggctgagatagctggtggatcagcccctgctccggctgcagccgctcctgcaagtgccggtgctgcaccagctgtgaagattgattcagttcatggtgctgactgtgacgatttgtcactgatgcacgcaaaggtggttgacatcagaaggccagatgaactgattctggaaagaccggagaaccgtccagttcttgtcgttgacgatggctcagagttgacacttgctcttgtgagggtgttgggagcctgtgcagttgtcttgacctttgagggattgcagttggctcagagagctggtgcagctgccattcgtcatgttctggctaaggacctttcagcagaatcagctgagaaggccatcaaagaggctgagcaaagatttggagcgttgggaggcttcataagccagcaagcagaaaggtttgaaccagctgagatactgggtttcacactcatgtgtgcgaagtttgccaaagcctctctctgcactgctgtggctggaggtcgtcctgccttcatcggtgtggctaggcttgacggcagacttggattcacctctcaaggcacttctgacgcactcaagagagcacagcgtggagcgatctttggactctgcaagacaatagggttggagtggtcagaatctgatgtgttcagccgtggtgtggacattgctcaagggatgcacccagaagatgctgcagttgccatagttagggagatggcgtgtgctgacatcagaatcagagaggttgggattggagcaaaccagcaaagatgcacaatcagagctgccaagttggagactgggaaccctcagagacagatagcgaaagacgatgtgcttctggtttctggaggtgctcgtgggatcacacctctttgcatccgtgagatcacgcgtcagattgctggaggcaagtacattctgttgggtcgtagcaaagtttctgcgtctgaaccagcatggtgtgctggcatcactgatgagaaggctgtgcagaaagctgccacccaagagttgaagagggccttcagtgctggtgaaggacccaaacccactccaagggctgtcacgaaacttgtgggatctgttcttggtgctcgtgaagtgagaagctccattgctgccattgaagctctgggtggcaaagcgatctacagctcttgtgatgtgaactctgctgcagatgttgccaaagcagttagggatgcagagtcccagcttggtgccagagttagtggaatcgttcacgcttctggtgtgctccgtgatcgtctcatagagaagaaactccctgacgagtttgatgctgtctttgggaccaaagtcactgggttggagaatcttctggctgcagttgatcgtgccaacctcaaacacatggttctcttcagctcccttgctggtttccacggcaatgttggtcagtctgactatgcgatggcaaacgaagctctcaacaagatgggtttggaacttgcgaaggatgtcagtgtcaagtccatctgctttggtccctgggatggtgggatggtgacacctcaactcaagaaacagtttcaagaaatgggagttcagatcattcctcgtgaaggaggtgctgatacagttgcgaggattgtgttgggatcaagtcctgctgagatccttgttggaaactggaggacaccatccaagaaagttggaagtgacacgatcaccctgcatagaaagatcagtgccaagtccaatcccttcttggaggatcatgtcatacaaggcagaagggtgttgccaatgacccttgctattgggagccttgctgagacctgccttggactcttccctggctactctctctgggccatagatgacgcacagctcttcaaaggtgtcactgttgatggagacgtcaactgtgaagtgaccctcacaccgtccactgctccgagtgggagggtgaatgtccaagcgacgctcaagacgttctcaagtggaaaacttgttccagcctacagagctgtcatagtgttgtccaaccaaggtgctccacctgccaatgcaaccatgcagcctccgagccttgatgcagatcctgctttgcaagggtcagtctatgatggcaagactctctttcatggtcctgcgttcagaggcattgatgacgttctcagctgcaccaagagccagcttgttgccaagtgttctgctgttcctggatcagatgcagccagaggagagtttgcaactgacactgatgcacatgatccctttgtcaatgatcttgcctttcaagcaatgttggtctgggtgaggagaacgctgggacaagctgcactcccgaactccattcagaggatagtccaacacagaccggtcccacaagacaaacccttctacatcaccctcagatccaatcagagtggtggacatagccagcacaaacatgcacttcagttccacaacgaacaaggtgatctcttcattgatgttcaagcctctgtcattgcgacagactcacttgcgttctgagtagttagcttaatcacttaggtcacccagtccaagcccggcctagcacgatgatcatgagtgttgctattgatgtatgttaatactatacacagtcatcgtgtgtgttttataaaactgtaagcttaggatgtttgaggctaatgtaattagcactacaccgtaataaatgagaggtttactttatgttttaataatgttcttacccttgctgctctctaaactgtaatggcgtacggttagctaaactaaagtaaaaatcgattcgcttgagtaaaattagtgaccgggaaagatcatcgactactactgctcagagatgtaatcggtaattaagacttcaagctcaataattaattaggagtaaatctggcttcgaatttttaaattgtcaacttccaaagaaggattggcaagactcaatctcaattgcccaacaaacatatggctctttacaaatttggaatctctttttgatggcaagaacgtcgtaattcctctgtcgatctcatgtaattaccaaactcatctacttattactttctttatatgcacttactgatgcggccgcttaattaagatgagtgatactcaggactcaggactcactctgctgatcactagtgctagcctcgaggtcgacacaactttgtatacaaaagttgtctagacctaggctcagcaactcatccagtcaagttcgagtcagtgagttgggcggccgcagcttatagtaaagatttttttgttaataaaatgaaagttaatatttatggatttatttgaacatatttacaagtttttgttaataaatttatttacagaagtgttaaatttgaaaatgtgttaaatgagagttaatatttatggatataatattactttatttaaaaataaaatgaatttatattaaaatatgatttggtaaaagatattataaagaggaacttggatgagaaagacgacgatgggcaaaagttgcatggcacaccgcttttgttcagtaacatctgcactgtggcgcctttttcacactcaccatgcatgctgccacgtcagctttcacactatgacaccactggccatacacgttgccacctcagctttctcctcttctcactatgacacgactggccatgcatgcatgcatgctgccacctcagctcccgcctcttcacccgtgtctttctctcatgtcgcagtgctgcgtgccaacctcttctctctataaatagagagaagagaatgatggttaaactcaaaccaaaacaagaaaacatacacaaatagcaaaacggatccacaaccaaaaatggctgcaaggaacgtgagtgcggctcatgagatgcatgacgagaagaggatagctgttgtgggcatggctgttcagtatgctggatgcaaaacgaaagacgagttctgggaagttctcatgaatggaaaagttgagagcaaagtgatcagcgacaaacgtcttggttcaaattaccgtgctgaacactacaaagctgaaaggagcaagtatgctgacaccttctgcaatgagacatatggaactcttgatgagaacgaaatagacaatgagcatgaactccttttgaaccttgccaaacaagccttggctgaaacatctgtcaaagattcaacaagatgtggcatagtttctggatgcctcagcttcccgatggacaacctccaaggtgaactcttgaatgtgtaccagaaccatgttgagaagaaacttggtgccagagttttcaaagatgcctctcactggtcagaaagagaacagtccaacaaaccagaggctggtgacagaagaatcttcatggaccctgcttcctttgttgctgaggaactcaatcttggcgctctccactactctgttgatgctgcctgtgccactgcgctctatgtgctcagactggcgcaagatcacttggtctctggtgcagctgatgtgatgctttgtggtgcaacatgcctgccggagccgtttttcatactctctgggttctcaaccttccaagccatgcctgttggaacgggtcagaatgtgtccatgccgctgcacaaagattctcaaggattgacccctggtgaaggaggttccatcatggtcctcaaacgtttggatgacgcaatcagagatggagatcacatctatggaacacttttgggagccaatgtcagcaacagtggcactggtctgccacttaaaccccttttgccgtcagagaaaaagtgcctcatggacacctacacacgtatcaatgtgcatccccacaagattcagtatgttgaatgccatgcaactgggactccacaaggtgatcgtgtggaaattgatgctgtgaaggcttgctttgaaggcaaagtcccacgttttggaaccacaaaagggaactttggacacacattggtggcagctgggtttgctggcatgtgcaaagtgcttctctccatgaagcacgggatcattccacccactccgggaatagatgacgaaacgaagatggaccctctggttgtctctggtgaggccattccctggccagaaacgaatggagaaccgaagcgtgctggtctctcagcgtttggatttggtgggaccaatgctcatgctgtctttgaggaacatgacccaagcaatgctgcatgcactggccatgactccatttctgctctctctgcacgttgtggtggtgagtcaaacatgagaatagcaatcactgggatggatgccacttttggtgctttgaaaggattggatgcttttgaaagggccatctacactggtgctcatggtgctataccactcccagaaaagagatggagattcctggggaaagacaaggacttccttgatctttgtggagtcaaagcaacaccgcatggctgttacattgaagatgttgaagttgatttccagaggctgaggactccaatgactcctgaagatatgctcttgcctcaacagcttctggctgtcaccacaattgatagggccatattggactctggcatgaagaaaggtggaaatgtggctgtctttgtggggttggggaccgatcttgaactctaccgtcaccgtgcaagggttgctctcaaggagagagtgaggcctgaagccagcaagaaactcaatgacatgatgcagtacatcaatgattgtgggacaagcacttcttacaccagctacataggcaacttggttgcaacaagggtcagttcacaatggggcttcacgggaccttccttcacaatcacagaaggcaacaattctgtgtacagatgtgctgaacttggcaaatacctcttggaaacgggagaggttgatggggttgtggttgcgggtgttgatctctgtgggagtgctgagaacctttacgtcaagtcaaggcgtttcaaggtgtctacatctgacaccccgagagccagctttgatgcagctgctgatggttactttgttggagagggctgtggtgcatttgtgctcaagcgtgagacaagctgcaccaaggatgacagaatctatgcttgcatggatgccatagttcctggaaatgttccatctgcatgtttgagagaggcattggatcaagccagagtcaagcctggagacatcgagatgttggagctttctgctgattcagcgaggcatttgaaggacccgtctgttctcccaaaggaactcactgctgaggaagagattggcggacttcagacgattcttcgtgacgatgacaagctcccaaggaatgttgcaactggaagtgtcaaggccactgttggtgacactggttatgcttctggtgctgccagtttgattaaggctgcgctttgcatctacaaccgttacctgcccagcaatggagatgactgggatgaacctgcacctgaagcaccctgggacagcacactctttgcgtgccagacctcaagagcttggttgaagaaccctggtgagagacgttatgcggctgtttccggagtcagtgaaaccagaagttgctacagtgtgctgctttctgaagcagagggacactacgagagagagaacagaatcagtttggatgaggaagcacccaagctcattgtgttgagagcagactcccatgaagagattcttggaagattggacaagataagggaaaggttcttgcagcccacgggtgctgcacccagagagtctgaattgaaggcgcaagcccgtaggatctttcttgaactccttggtgagacccttgcccaagatgcagcttcatctggaagtcagaagccccttgctctcagcttggtctccactccatccaagctccagagagaggtggaacttgcggcaaaaggcattccgagatgtctcaagatgagacgtgattggagttcccctgctggaagcagatatgcgcctgagcctttggccagtgacagagttgccttcatgtatggagaaggaaggagcccttactatggcatcacacaagacattcataggatttggcctgaacttcatgaggtcatcaatgagaaaacaaaccgtctctgggctgaaggtgacagatgggtcatgccaagggccagcttcaagagtgagcttgagtcacaacagcaagagtttgacagaaacatgattgaaatgttccgtcttggaatcctcacctcaattgccttcacaaacctggcgagagatgttctcaacatcacgcccaaagcagcctttggactcagtttgggagagatttccatgatctttgctttctccaagaaaaacggtttgataagcgatcagttgacaaaggatttgagagagtcagatgtctggaacaaagctctggctgttgagttcaatgcgctcagagaagcctggggcattccacagtctgtcccaaaagatgagttctggcaaggttacatagtgaggggaacgaaacaagacatagaagcagccatagcaccagactcaaagtatgtgaggttgaccatcatcaatgatgccaacactgctctcatcagtggaaagcctgatgcatgcaaagctgcgattgctcgtcttggtggcaacatccctgcgcttccagtcactcaaggcatgtgtgggcattgcccagaggtgggaccttacaccaaggacatcgcaaagatccacgccaaccttgagttccctgtggttgatggtcttgatctctggactaccataaaccagaagaggcttgtgccaagagccacgggtgccaaagatgaatgggctccttcatcctttggggagtatgctggacagctctatgagaaacaagccaacttccctcagatagttgaaaccatctacaagcagaactatgatgtgtttgttgaagttgggccaaacaatcacagaagcacagcagtgagaaccacgcttggaccacagagaaaccaccttgctggtgccatagacaagcagaacgaggatgcttggacgacaatagtcaagctcgtggcttcattgaaggctcaccttgttcctggagtgaccatcagtccgctctaccactccaagctcgttgcagaggctgaggcttgttatgctgcgctctgtaaaggtgagaaacccaagaaaaacaagtttgtgagaaagattcagttgaatggcagattcaacagcaaggcagaccccatctcctcagcagaccttgcatccttcccacctgcggaccctgcgattgaagctgccatctcttcaaggatcatgaagcctgtggctccgaaattctatgcgcgtctcaacattgatgagcaagatgagaccagagatccgatcttgaacaaggacaatgcgccttccagctccagctcttccagcagttcctcttccagcagttcatctccgtctcctgctccttcagctccagttcagaagaaagctgccccagctgcggagacaaaagctgttgccagtgctgatgcacttcgtagtgccctgcttgatcttgactccatgcttgcgctcagctctgcaagtgcttctggcaaccttgttgagactgcgccatctgatgccagtgtcattgtccctccgtgcaacattgctgatcttggcagcagagctttcatgaaaacttatggtgtttctgcgcctctgtacaccggtgcaatggccaagggaattgcctctgcggacttggtgatcgcagctggaaggcaaggaatccttgcgtcatttggtgctggaggccttccaatgcaagttgtgcgtgagtccattgaaaagattcaagctgccctgcccaatggaccatatgctgtcaacctcatccattctccttttgacagcaaccttgagaagggaaatgttgatctcttcttggaaaagggtgtcacttttgttgaggcttcagccttcatgacgttgacaccgcaagttgtcagatacagagcggctgggttgacgaggaatgcagatgggtcagtcaacataaggaacagaatcattgggaaagtctccagaactgagctggctgaaatgttcatgcgtcctgcacctgagcatcttttgcagaagctcattgcttctggggagatcaatcaagaacaagctgagttggccagacgtgttcctgtggctgatgacattgcggttgaagctgattctggtggacacactgacaaccgtccaatccatgtcattctgcctctgattatcaacctgagggataggcttcacagagagtgtggatacccagcaaacctgagggttcgtgttggtgctgggggtggcattgggtgtccccaagctgcgctggcaactttcaacatgggtgcctctttcattgtcactggaacagtgaaccaagttgccaaacaatctgggacgtgtgacaatgtgaggaaacagcttgcgaaagcaacttactcagatgtttgcatggcaccggcagctgacatgtttgaggaaggtgtgaaacttcaagttttgaagaaaggaacaatgttcccttcaagagccaacaaactctatgagttgttctgcaagtatgattcttttgagtccatgcctccagcagagcttgcgagggttgagaaaagaatcttcagtcgtgcattggaagaggtctgggatgagaccaagaacttctacatcaaccgtctccacaacccagagaagatacagagggctgagagggaccccaaactgaagatgtcactgtgtttcagatggtatctgtccctggcttcaaggtgggccaacactggagcttctgacagagtcatggactaccaagtttggtgtggtcctgccattggttcattcaatgatttcatcaaaggaacttaccttgatccggcagtggcaaatgagtacccgtgtgttgtgcagatcaacaaacagattcttagaggagcgtgcttcttgaggcgtcttgaaatactgagaaatgcaaggctttcagatggtgcagctgcacttgtggcgagcattgatgacacatatgtccctgctgagaagctgtgagtagttagcttaatcacttaggtcacccagtccaagcccggcctagcacgatgatcatgagtgttgctattgatgtatgttaatactatacacagtcatcgtgtgtgttttataaaactgtaagcttaggatgtttgaggctaatgtaattagcactacaccgtaataaatgagaggtttactttatgttttaataatgttcttacccttgctgctctctaaactgtaatggcgtacggttagctaaactaaagtaaaaatcgattcgcttgagtaaaattagtgaccgggaaagatcatcgactactactgctcagagatgtaatcggtaattaagacttcaagctcaataattaattaggagtaaatctggcttcgaatttttaaattgtcaacttccaaagaaggattggcaagactcaatctcaattgcccaacaaacatatggctctttacaaatttggaatctctttttgatggcaagaacgtcgtaattcctctgtcgatctcatgtaattaccaaactcatctacttattactttctttatatgcacttactgatgcggccgcttaattaatctgacctgaccactagacctgagtgagtacagatgtgctactagtgctagcctcgaggtcgaccaacttttctatacaaagttgtctagacctaggactaggcactgagtgactcactgacctgactgagtgactggcggccgcagcttatagtaaagatttttttgttaataaaatgaaagttaatatttatggatttatttgaacatatttacaagtttttgttaataaatttatttacagaagtgttaaatttgaaaatgtgttaaatgagagttaatatttatggatataatattactttatttaaaaataaaatgaatttatattaaaatatgatttggtaaaagatattataaagaggaacttggatgagaaagacgacgatgggcaaaagttgcatggcacaccgcttttgttcagtaacatctgcactgtggcgcctttttcacactcaccatgcatgctgccacgtcagctttcacactatgacaccactggccatacacgttgccacctcagctttctcctcttctcactatgacacgactggccatgcatgcatgcatgctgccacctcagctcccgcctcttcacccgtgtctttctctcatgtcgcagtgctgcgtgccaacctcttctctctataaatagagagaagagaatgatggttaaactcaaaccaaaacaagaaaacatacacaaatagcaaaacggatccacaaccaaaaatggcgcttcgtgtcaagaccaacaagaagccatgttgggagatgaccaaggaggaactgacctctggcaaaactgaggtgttcaactatgaggaactcctggagtttgcagagggtgacatagctaaggtttttggtccggagtttgctgtcatagacaagtaccccagaagggtgaggctgcctgctcgtgaatacctgcttgtgacaagggtcacactcatggatgccgaggtcaacaactacagagttggtgccagaatggtcactgagtatgatcttccagtgaatggcgaattgtctgagggaggtgattgtccctgggcagttctggttgagagtggacagtgcgatttgatgctgatatcatacatgggaattgatttccagaaccaaggtgacagagtttaccgtctgctcaacaccacgttgacattctatggggttgcccatgagggagagacccttgagtatgacatcagagtgaccggttttgccaaacgtttggatggtggcatctccatgttcttctttgagtatgactgctatgtcaatgggaggcttctcattgagatgagagatggctgtgctggcttcttcacaaatgaggagcttgatgcgggaaagggtgtggtgttcacaagaggggatttggctgccagagctaagattccaaagcaagatgtttctccctatgctgtcgctccctgccttcacaaaacaaaactcaacgaaaaggagatgcagaccttggttgacaaagattgggcttccgtttttggctcaaagaatggcatgccggagatcaactacaaactctgcgcacgtaagatgctcatgattgatagagtcaccagcattgaccataagggaggtgtgtacggtttgggtcagttggttggtgagaaaatcttggagagggaccattggtacttcccatgccattttgttaaggatcaagtcatggctggatctcttgtcagcgacggttgttcacaaatgctcaagatgtacatgatctggctcggtttgcaccttaccaccggaccatttgacttcagacccgtcaacggacacccgaacaaagttaggtgtaggggtcagatatctcctcataagggaaagttggtctacgtcatggagatcaaagagatgggattcgacgaggataacgatccgtacgccattgctgacgtcaacatcattgacgttgatttcgaaaagggtcaagatttcagccttgatagaatcagcgactacggaaagggggatcttaacaaaaagatcgtcgtggacttcaagggcattgctctcaagatgcagaagagatccacgaacaagaacccctccaaagttcagcccgtttttgctaacggtgcagccactgtgggaccggaagcgtccaaggccagctctggtgccagtgctagtgcttctgctgcccctgcgaagcctgctttctcagcagatgttcttgcgccaaagccagttgcacttcctgaacatatcctcaagggtgacgctctcgctccgaaagaaatgtcctggcatcccatgtcaaaacttcctggcaacccgacgccgttcttctcccctagttcttaccctccgagggcaatttgcttcatccctttccctggcaacccacttgacaacaattgcaaagctggagaaatgcctctgaactggtacaacatgtcagagttcatgtgtggaaaagttagcaactgcttgggaccagagttcgcaagatttgataagtcaaatacgagcagaagccctgcttttgatttggctcttgtgactagagttgttgaagtcacaaacatggaacatggcaagttcctgaatgttgattgcaatcccagcaaaggcacaatggtgggggagtttgactgtcctcaagatgcgtggttctttgatggttcttgcaatgatgggcacatgccttattccatcatcatggaaatcggacttcagacatccggtgttctcaccagtgtgttgaaagcaccactgacgatggacaaagatgacattctctttaggaaccttgatgcaagtgctgaaatggtgaggccagatgtggatgtgagggggaaaaccataaggaatgtgaccaagtgcactggatatgcaatgttgggaaagatggggattcacagattcacgtttgagttgtctgttgatggcgtggttttctacaaaggaagcacttcctttggatggttcactccagaggtgtttgctcagcaagctggacttgacaatgggaaaaagacggagccttggtgcaaaactaacaacacgagtgtgagaagagttgaaatcgcatcagccaaaggcaaagaacagctgactgagaaacttccagatgcaactaatgctcaagttctcagaaggtcagaacagtgtgagtatttggattacctcaacattgctcctgattctgggctgcatgggaaaggatatgcgcatggacacaaagatgttaacccacaagactggttcttctcttgtcacttttggtttgatcctgtgatgcctggatctttgggaattgagtcaatgttccagctcattgaggcatttgcggtggaccagaacataccgggagaatacaatgtgagcaatccgacctttgcccatgcccctggaaaaacggcgtggaagtaccgtggtcaattgacaccaaagaaccgtgcgatggactgtgaggtgcacatagtttcaatcacagcctctcctgaaaatggaggctacgttgacatagtggcagatggagcactttgggttgatggtctccgtgtgtatgaagccaaagaactcagagttcgtgttgtcagtgcaaaacctcaagccattccggatgttcaacaacagccacccagcgcaaaagcggaccctgggaaaactggagttgcactcagtccgactcagttgagagatgtcctgcttgaagtggacaatccattgtatcttggtgttgaaaactccaatttggtgcagtttgaatccaaacctgcaacttcttcaaggattgtcagtatcaaaccatgctccataagtgatcttggtgacaagtccttcatggaaacgtacaatgtgtcagcacctctgtacactggagcaatggccaagggaattgcgtctgcggaccttgtcattgctgctgggaagaggaagatattgggttcttttggagcgggtgggcttccaatgcaccatgtgagggcagctttggagaagatacaagcggctctgcctcaaggaccatatgctgtgaacctcattcattcaccttttgacagcaacttggaaaaggggaatgttgatctcttcctcgaaaagggcgttactgtggtggaggcttctgcattcatgaccctcactccccaagttgttcgttaccgtgcagccggactctcaaggaacgctgatgggagtgtcaacatcagaaaccgtatcattggaaaagtgtccagaacagaactcgccgaaatgttcatcagaccggctccggaacacctccttgagaaactcatagcttctggtgagataacacaagaacaagccgaacttgcccgtcgtgttcctgtcgcagacgacatcgctgttgaagctgattctggtggtcacactgacaaccgtcccatccacgtcatcttgcctttgatcatcaaccttaggaacagactgcacagagagtgtggttatcctgcgcaccttagagtcagagttggagctggaggcggtgttggctgcccacaagctgctgcggctgccctcacaatgggagctgccttcatagtgactgggactgtcaatcaagttgctaaacagtccgggacatgtgacaacgtgagaaaacaactcagtcaagccacctacagtgacatttgcatggctccagcagctgatatgtttgaggaaggtgtgaaactccaagttctcaagaagggaacaatgttcccatcaagagctaacaaattgtacgaactcttttgcaagtacgactctttcgattcaatgcctcctgctgaacttgaaaggatcgagaagaggatcttcaagagggcacttcaagaggtctgggaagagaccaaggacttttacatcaatggtttgaagaatccagagaagatacagagagcggaacatgaccccaaactcaagatgtctttgtgtttcagatggtatcttggtcttgcatcacgttgggccaacatgggtgctcctgatcgtgtcatggactatcaagtctggtgtggtccagccattggagccttcaatgacttcatcaaaggaacatatcttgatcctgctgtctctaatgagtacccatgtgttgtccagatcaaccttcagattttgcgtggtgcatgttacctgaggcgtcttaatgctctgagaaatgatccgaggattgatcttgagactgaagatgctgcctttgtctatgagccaacgaatgcgctttgagtagttagcttaatcacttaggtcacccagtccaagcccggcctagcacgatgatcatgagtgttgctattgatgtatgttaatactatacacagtcatcgtgtgtgttttataaaactgtaagcttaggatgtttgaggctaatgtaattagcactacaccgtaataaatgagaggtttactttatgttttaataatgttcttacccttgctgctctctaaactgtaatggcgtacggttagctaaactaaagtaaaaatcgattcgcttgagtaaaattagtgaccgggaaagatcatcgactactactgctcagagatgtaatcggtaattaagacttcaagctcaataattaattaggagtaaatctggcttcgaatttttaaattgtcaacttccaaagaaggattggcaagactcaatctcaattgcccaacaaacatatggctctttacaaatttggaatctctttttgatggcaagaacgtcgtaattcctctgtcgatctcatgtaattaccaaactcatctacttattactttctttatatgcacttactgatgcggccgcttaattaatcacgagtggatgactgtcacgactgactcatgactgactactagtgctagcctcgaggtcgacacaactttgtataataaagttgtctagacctaggcgagtcatgagtcgtgacatgacgtcatgctcatcagactgcggccgcagcttatagtaaagatttttttgttaataaaatgaaagttaatatttatggatttatttgaacatatttacaagtttttgttaataaatttatttacagaagtgttaaatttgaaaatgtgttaaatgagagttaatatttatggatataatattactttatttaaaaataaaatgaatttatattaaaatatgatttggtaaaagatattataaagaggaacttggatgagaaagacgacgatgggcaaaagttgcatggcacaccgcttttgttcagtaacatctgcactgtggcgcctttttcacactcaccatgcatgctgccacgtcagctttcacactatgacaccactggccatacacgttgccacctcagctttctcctcttctcactatgacacgactggccatgcatgcatgcatgctgccacctcagctcccgcctcttcacccgtgtctttctctcatgtcgcagtgctgcgtgccaacctcttctctctataaatagagagaagagaatgatggttaaactcaaaccaaaacaagaaaacatacacaaatagcaaaacggatccacaaccaaaaatggctcccactcccgacgccaccgcgcctctgaacaagccgagcgactatgccgtctaccacgaggaagacggccccttctggaccgccgattccagcggcgtctcgcgcgtgaactttagcgagaccggcgtgggatccgagggcgtcatccctgcgctcacgctcatcgacgtcttcgagagggccgtcaagcgcggcggaaacaggatcgccttccgcacggaaaacatgcccacgctccgccgcggcgaagaggccccggacgcgctgccgctcaaggactggaagtcctggtcctggaaacagtacaaggccgacgtccaccgcatcgccagggctctcatggacctcggcgttgagcagcacgacgccgtctcgatttttggctttaactcgcccgaatggtttctcagtgccgtcggcgccgtgcacgcaggtgccaagattgccggtatttacccctcagacacgcccgcccaggtccagtacaaggccttccacagtgacaccgctgttgccgttgtcgaaaacgagcagtgcttcaagaagttcgccgaggtcgtcgaggaccttccttacctcaaggccattgtttgctgggactatgaagccacagacatcacgcgcgaggacggctccgtcgtcgaggtcctcacctttgccgagttcctcaagcgcggcgacaccgtcgaggcggccgcccttgacgagcgcatctccaagatcgagcccaccatgtgcgctgcccttatttacaccagcggtactaccggccgccccaaggccgttatgatttcgcacgacaaccttgttttcgaggccagcgccgtcgtccccaacctcggaggagcctgtacgaccactgctgaggagcgcattctctcgtacctgcctctctcgcacgtcgctggtatgatggttgatattattgcccccatcattgccaccgccttccacaagggccgcatctgcgtctgctttgctcgcccgtacgatttgcgcaccggcacgctgggccagcgcctcaacgccgtggagcccaccatcttccttggcgtgccccgtgtgtgggaaaagattcaggaaaagctcatggccgtcggtgccaaaaccaccggcctcaagaagaagctctctacggccgccaagaagcgtggtcttgaattccaggaggagcagcaaatcggccgctccggtgccaaccctggctttggcccccttggcatctacaagaagctcctcggcctcatcaagggcaagctgggcctcaccaagtgcaagtttgcctttgctggtgccgcgcccatgacccgtgagacccttcagtactttggcgcgctgaacatcaacattaacgaggtctacggcatgtcagagtgctccggtgccgccacctggtccacggacaaggcccacgagtggggcactgttggctacgagatgcccagttgcgaggtccgcgtcttcaagattgccgaggacggtaccaagaccgagtgcccgcgcgccgccgacattatgcatgctaccgaggaggagcagggcgaagtttgcttccgcggccgtaacatcatgatgggctaccttgccaaccccaagcttggcgacgaccacgttgccgagatcgaggagaagaacgctgccgctatcgactccgagggctggctccacagtggtgataagggcgccatttctacccgcggcatgctcaagatcacgggccgctacaaggagctcatcatcggcgccggtggcgagaacgtggcgcccgtccctattgaggacgccatcaaggcgcgcatgccttttgtttccaacgccatgatggtcggagataagcgcaagttcatggctgtcctccttaccctcaagacggttggcgccacgggcgagcttcccggtacgaacaagctcatgggcgctgccgccgactacggtgagaccatcgaggacgcctgcgacaacgaggcgctcattgaggagatcacgcagcagctcaaggagatcggtgatgatggcgatgtcacgccctcgaacgcggctcgcatccaaaagttcaccattctcccgctcgacttttccgtctccacggacgagctcacggccacgctcaagctcaagcgctccgtggtcgcagacaagtacgaagacatcatcgaggccttttacgagtccaagagcgtttttgtgccgtactcgaccgttggcgcctacgccacgggcggcccggtcgacgactccgttgtcgatggctcattcaagggcgactttagcatgattggcgacgatgatccggatcttcaaaacgtcgatgtcctcgaggcgattgacgaggacaattaagtagttagcttaatcacttaggtcacccagtccaagcccggcctagcacgatgatcatgagtgttgctattgatgtatgttaatactatacacagtcatcgtgtgtgttttataaaactgtaagcttaggatgtttgaggctaatgtaattagcactacaccgtaataaatgagaggtttactttatgttttaataatgttcttacccttgctgctctctaaactgtaatggcgtacggttagctaaactaaagtaaaaatcgattcgcttgagtaaaattagtgaccgggaaagatcatcgactactactgctcagagatgtaatcggtaattaagacttcaagctcaataattaattaggagtaaatctggcttcgaatttttaaattgtcaacttccaaagaaggattggcaagactcaatctcaattgcccaacaaacatatggctctttacaaatttggaatctctttttgatggcaagaacgtcgtaattcctctgtcgatctcatgtaattaccaaactcatctacttattactttctttatatgcacttactgatgcggccgcttaattaatctgatcatggatgctacgtcacggcagtacaggactatccctaggagctgtgctgggtaactcacatgagtcactggtcacatcagcggccgcagcttatagtaaagatttttttgttaataaaatgaaagttaatatttatggatttatttgaacatatttacaagtttttgttaataaatttatttacagaagtgttaaatttgaaaatgtgttaaatgagagttaatatttatggatataatattactttatttaaaaataaaatgaatttatattaaaatatgatttggtaaaagatattataaagaggaacttggatgagaaagacgacgatgggcaaaagttgcatggcacaccgcttttgttcagtaacatctgcactgtggcgcctttttcacactcaccatgcatgctgccacgtcagctttcacactatgacaccactggccatacacgttgccacctcagctttctcctcttctcactatgacacgactggccatgcatgcatgcatgctgccacctcagctcccgcctcttcacccgtgtctttctctcatgtcgcagtgctgcgtgccaacctcttctctctataaatagagagaagagaatgatggttaaactcaaaccaaaacaagaaaacatacacaaatagcaaaacggatccacaaccaaaaatgcttcagcacacttggcttccgaagcctcccaatctgaccctcttgtcagatgaggttcatctctggaggattcctcttgaccagcctgagtcacaacttcaagaccttgctgccaccctgagcagtgatgaattggcgagggcaaacagattctactttccagaacacagaaggcgtttcactgctgggagaggcatcctcagatccatcttgggtggatacttgggagtggaaccgggtcaagtcaagtttgattatgagtcccgtgggaaaccgatccttggtgacagatttgctgagagtggactcctgttcaacttgtctcacagccagaaccttgccttgtgtgctgtcaactacacgcgtcaaataggcattgatcttgaatatctgcgtccaacatctgacttggagtctcttgcaaagaggttctttctcccaagagaatatgaactcttgaggtcactccctgatgagcagaaacagaagattttctttcgttactggacttgcaaagaggcttatctcaaagcaacgggagatggaatagccaaacttgaagagatcgagatagcactcaccccaacagaacctgccaagctccaaacagctcctgcgtggtctctgttggagcttgtgccagatgacaattgtgttgcagctgtggctgttgcgggttttggttggcagcccaagttctggcattactgagtagttagcttaatcacttaggtcacccagtccaagcccggcctagcacgatgatcatgagtgttgctattgatgtatgttaatactatacacagtcatcgtgtgtgttttataaaactgtaagcttaggatgtttgaggctaatgtaattagcactacaccgtaataaatgagaggtttactttatgttttaataatgttcttacccttgctgctctctaaactgtaatggcgtacggttagctaaactaaagtaaaaatcgattcgcttgagtaaaattagtgaccgggaaagatcatcgactactactgctcagagatgtaatcggtaattaagacttcaagctcaataattaattaggagtaaatctggcttcgaatttttaaattgtcaacttccaaagaaggattggcaagactcaatctcaattgcccaacaaacatatggctctttacaaatttggaatctctttttgatggcaagaacgtcgtaattcctctgtcgatctcatgtaattaccaaactcatctacttattactttctttatatgcacttactgatgcggccgcttaattaactactgtcactgaggccgtagacgagtacggactgatctaactagtgctagcctcgaggtcgacacccagctttcttgtacaaagtggttgcggccgcttaattaaatttaaattcaattaatgcaatcttgattttcaacaacgaaggtaatggcgtaaaagaaaaaatgtatgttattgtattgatctttcatgatgttgaagcgtgccataatatgatgatgtataattaaaatattaactgtcgcattttattgaaatggcactgttatttcaaccatatctttgattctgttacatgacacgactgcaagaagtaaataatagacgccgttgttaaagaattgctatcatatgtgcctaactagagggaatttgagcgtcagacctaatcaaatattacaaaatatctcactctgtcgccagcaatggtgtaatcagcgcagacaaatggcgtaaagatcgcggaaaaacctccccgagtggcatgatagctgcctctgtattgctgatttagtcagccttatttgacttaagggtgccctcgttagtgacaaattgctttcaaggagacagccatgccccacactttgttgaaaaacaaattgcctttggggagacggtaaagccagttgctcttcaataaggaatgtcgaggaggcaatgtaaccgcctctggtagtacacttctctaatccaaaaatcaatttgtattcaagataccgcaaaaaacttatggtttaaaccctgcaggactagtccagaaggtaattatccaagatgtagcatcaagaatccaatgtttacgggaaaaactatggaagtattatgtaagctcagcaagaagcagatcaatatgcggcacatatgcaacctatgttcaaaaatgaagaatgtacagatacaagatcctatactgccagaatacgaagaagaatacgtagaaattgaaaaagaagaaccaggcgaagaaaagaatcttgaagacgtaagcactgacgacaacaatgaaaagaagaagataaggtcggtgattgtgaaagagacatagaggacacatgtaaggtggaaaatgtaagggcggaaagtaaccttatcacaaaggaatcttatcccccactacttatccttttatatttttccgtgtcatttttgcccttgagttttcctatataaggaaccaagttcggcatttgtgaaaacaagaaaaaatttggtgtaagctattttctttgaagtactgaggatacaacttcagagaaatttgtaagtttgtaggtaccagatctggatcccaaaccatgtctccggagaggagaccagttgagattaggccagctacagcagctgatatggccgcggtttgtgatatcgttaaccattacattgagacgtctacagtgaactttaggacagagccacaaacaccacaagagtggattgatgatctagagaggttgcaagatagatacccttggttggttgctgaggttgagggtgttgtggctggtattgcttacgctgggccctggaaggctaggaacgcttacgattggacagttgagagtactgtttacgtgtcacataggcatcaaaggttgggcctaggatctacattgtacacacatttgcttaagtctatggaggcgcaaggttttaagtctgtggttgctgttataggccttccaaacgatccatctgttaggttgcatgaggctttgggatacacagcccggggtacattgcgcgcagctggatacaagcatggtggatggcatgatgttggtttttggcaaagggattttgagttgccagctcctccaaggccagttaggccagttacccaaatctgagtagttagcttaatcacctagagctcgatcggcggcaatagcttcttagcgccatcccgggttgatcctatctgtgttgaaatagttgcggtgggcaaggctctctttcagaaagacaggcggccaaaggaacccaaggtgaggtgggctatggctctcagttccttgtggaagcgcttggtctaaggtgcagaggtgttagcgggatgaagcaaaagtgtccgattgtaacaagatatgttgatcctacgtaaggatattaaagtatgtattcatcactaatataatcagtgtattccaatatgtactacgatttccaatgtctttattgtcgccgtatgtaatcggcgtcacaaaataatccccggtgactttcttttaatccaggatgaaataatatgttattataatttttgcgatttggtccgttataggaattgaagtgtgcttgaggtcggtcgccaccactcccatttcataattttacatgtatttgaaaaataaaaatttatggtattcaatttaaacacgtatacttgtaaagaatgatatcttgaaagaaatatagtttaaatatttattgataaaataacaagtcaggtattatagtccaagcaaaaacataaatttattgatgcaagtttaaattcagaaatatttcaataactgattatatcagctggtacattgccgtagatgaaagactgagtgcgatattatggtgtaatacataggaattcgtttaaacgatctgcgtctaattttcggtccaacttgcacaggaaagacgtcgaccgcggtagctcttgcccagcagactgggcttccagtcctttcgctcgatcgggtccaatgttgtcctcagctgtgaaccggaagcggacgaccaacagtggaagaactgaaaggaacgagccgtctataccttgatgatcggcctctggtgaagggtatcatcgcagccaagcaagctcatgaaaggctgatgggggaggtgtataattatgaggcccacggcgggcttattctttagggaggatctatctcgttgctcaagtgcatggcgcaaagcagttattggagtgcggattttcgttggcatattattcgccacgagttagcagacgaagagaccttcatgaacgtggccaaggccagagttaagcagatgttacgccctgctgcaggcctttctattatccaatagttggttgatctttggaaagagcctcggctgaggcccatactgaaagagatcgatggatatcgatatgccatgttgtttgctagccagaaccagatcacatccgatatgctattgcagcttgacgcagatatggaggataagttgattcatgggatcgctcaggagtagctcatccatgcacgccgacaagaacagaaattccgtcgagttaacgcagccgcttacgacggattcgaaggtcatccattcggaatgtattagtttgcaccagctccgcgtcacacctgtcttcatttgaataagatgttagcaattgtttttagctttgtcttgttgtggcagggcggcaagtgcttcagacatcattctgttttcaaattttatgctggagaacagcttcttaattcctttggaaataatagactgcgtcttaaaattcagatgtctggatatagatatgattgtaaaataacctatttaagtgtcatttagaacataagttttatgaatgttcttccattttcgtcatcgaacgaataagagtaaatacaccttttttaacattacaaataagttcttatacgttgtttatacaccgggaatcatttccattattttcgcgcaaaagtcacggatattcgtgaaagcgacataaactgcgaaatttgcggggagtgtcttgagtttgcctcgaggctagcgcatgcacatagacacacacatcatctcattgatgcttggtaataattgtcattagattgtttttatgcatagatgcactcgaaatcagccaattttagacaagtatcaaacggatgtgacttcagtacattaaaaacgtccgcaatgtgttattaagttgtctaagcgtcaatttgatttacaattgaatatatcctgccccagccagccaacagctcgatttacaattgaatatatcctgccggccggcccacgcgtgtcgaggaattctgatctggcccccatttggacgtgaatgtagacacgtcgaaataaagatttccgaattagaataatttgtttattgctttcgcctataaatacgacggatcgtaatttgtcgttttatcaaaatgtactttcattttataataacgctgcggacatctacatttttgaattgaaaaaaaattggtaattactctttctttttctccatattgaccatcatactcattgctgatccatgtagatttcccggacatgaagccatttacaattgaatatatcctgccgccgctgccgctttgcacccggtggagcttgcatgttggtttctacgcagaactgagccggttaggcagataatttccattgagaactgagccatgtgcaccttccccccaacacggtgagcgacggggcaacggagtgatccacatgggacttttaaacatcatccgtcggatggcgttgcgagagaagcagtcgatccgtgagatcagccgacgcaccgggcaggcgcgcaacacgatcgcaaagtatttgaacgcaggtacaatcgagccgacgttcacgcggaacgaccaagcaagcttggctgccatttttggggtgaggccgttcgcggccgaggggcgcagcccctggggggatgggaggcccgcgttagcgggccgggagggttcgagaagggggggcaccccccttcggcgtgcgcggtcacgcgcacagggcgcagccctggttaaaaacaaggtttataaatattggtttaaaagcaggttaaaagacaggttagcggtggccgaaaaacgggcggaaacccttgcaaatgctggattttctgcctgtggacagcccctcaaatgtcaataggtgcgcccctcatctgtcagcactctgcccctcaagtgtcaaggatcgcgcccctcatctgtcagtagtcgcgcccctcaagtgtcaataccgcagggcacttatccccaggcttgtccacatcatctgtgggaaactcgcgtaaaatcaggcgttttcgccgatttgcgaggctggccagctccacgtcgccggccgaaatcgagcctgcccctcatctgtcaacgccgcgccgggtgagtcggcccctcaagtgtcaacgtccgcccctcatctgtcagtgagggccaagttttccgcgaggtatccacaacgccggcggccgcggtgtctcgcacacggcttcgacggcgtttctggcgcgtttgcagggccatagacggccgccagcccagcggcgagggcaaccagcccggtgagcgtcggaaagggtcgacggatcttttccgctgcataaccctgcttcggggtcattatagcgattttttcggtatatccatcctttttcgcacgatatacaggattttgccaaagggttcgtgtagactttccttggtgtatccaacggcgtcagccgggcaggataggtgaagtaggcccacccgcgagcgggtgttccttcttcactgtcccttattcgcacctggcggtgctcaacgggaatcctgctctgcgaggctggccggctaccgccggcgtaacagatgagggcaagcggatggctgatgaaaccaagccaaccaggaagggcagcccacctatcaaggtgtactgccttccagacgaacgaagagcgattgaggaaaaggcggcggcggccggcatgagcctgtcggcctacctgctggccgtcggccagggctacaaaatcacgggcgtcgtggactatgagcacgtccgcgagctggcccgcatcaatggcgacctgggccgcctgggcggcctgctgaaactctggctcaccgacgacccgcgcacggcgcggttcggtgatgccacgatcctcgccctgctggcgaagatcgaagagaagcaggacgagcttggcaaggtcatgatgggcgtggtccgcccgagggcagagccatgacttttttagccgctaaaacggccggggggtgcgcgtgattgccaagcacgtccccatgcgctccatcaagaagagcgacttcgcggagctggtattcgtgcagggcaagattcggaataccaagtacgagaaggacggccagacggtctacgggaccgacttcattgccgataaggtggattatctggacaccaaggcaccaggcgggtcaaatcaggaataagggcacattgccccggcgtgagtcggggcaatcccgcaaggagggtgaatgaatcggacgtttgaccggaaggcatacaggcaagaactgatcgacgcggggttttccgccgaggatgccgaaaccatcgcaagccgcaccgtcatgcgtgcgccccgcgaaaccttccagtccgtcggctcgatggtccagcaagctacggccaagatcgagcgcgacagcgtgcaactggctccccctgccctgcccgcgccatcggccgccgtggagcgttcgcgtcgtctcgaacaggaggcggcaggtttggcgaagtcgatgaccatcgacacgcgaggaactatgacgaccaagaagcgaaaaaccgccggcgaggacctggcaaaacaggtcagcgaggccaagcaggccgcgttgctgaaacacacgaagcagcagatcaaggaaatgcagctttccttgttcgatattgcgccgtggccggacacgatgcgagcgatgccaaacgacacggcccgctctgccctgttcaccacgcgcaacaagaaaatcccgcgcgaggcgctgcaaaacaaggtcattttccacgtcaacaaggacgtgaagatcacctacaccggcgtcgagctgcgggccgacgatgacgaactggtgtggcagcaggtgttggagtacgcgaagcgcacccctatcggcgagccgatcaccttcacgttctacgagctttgccaggacctgggctggtcgatcaatggccggtattacacgaaggccgaggaatgcctgtcgcgcctacaggcgacggcgatgggcttcacgtccgaccgcgttgggcacctggaatcggtgtcgctgctgcaccgcttccgcgtcctggaccgtggcaagaaaacgtcccgttgccaggtcctgatcgacgaggaaatcgtcgtgctgtttgctggcgaccactacacgaaattcatatgggagaagtaccgcaagctgtcgccgacggcccgacggatgttcgactatttcagctcgcaccgggagccgtacccgctcaagctggaaaccttccgcctcatgtgcggatcggattccacccgcgtgaagaagtggcgcgagcaggtcggcgaagcctgcgaagagttgcgaggcagcggcctggtggaacacgcctgggtcaatgatgacctggtgcattgcaaacgctagggccttgtggggtcagttccggctgggggttcagcagccagcgctttactggcatttcaggaacaagcgggcactgctcgacgcacttgcttcgctcagtatcgctcgggacgcacggcgcgctctacgaactgccgataaacagaggattaaaattgacaattgtgattaaggctcagattcgacggcttggagcggccgacgtgcaggatttccgcgagatccgattgtcggccctgaagaaagctccagagatgttcgggtccgtttacgagcacgaggagaaaaagcccatggaggcgttcgctgaacggttgcgagatgccgtggcattcggcgcctacatcgacggcgagatcattgggctgtcggtcttcaaacaggaggacggccccaaggacgctcacaaggcgcatctgtccggcgttttcgtggagcccgaacagcgaggccgaggggtcgccggtatgctgctgcgggcgttgccggcgggtttattgctcgtgatgatcgtccgacagattccaacgggaatctggtggatgcgcatcttcatcctcggcgcacttaatatttcgctattctggagcttgttgtttatttcggtctaccgcctgccgggcggggtcgcggcgacggtaggcgctgtgcagccgctgatggtcgtgttcatctctgccgctctgctaggtagcccgatacgattgatggcggtcctgggggctatttgcggaactgcgggcgtggcgctgttggtgttgacaccaaacgcagcgctagatcctgtcggcgtcgcagcgggcctggcgggggcggtttccatggcgttcggaaccgtgctgacccgcaagtggcaacctcccgtgcctctgctcacctttaccgcctggcaactggcggccggaggacttctgctcgttccagtagctttagtgtttgatccgccaatcccgatgcctacaggaaccaatgttctcggcctggcgtggctcggcctgatcggagcgggtttaacctacttcctttggttccgggggatctcgcgactcgaacctacagttgtttccttactgggctttctcagcccccgagcgcttagtgggaatttgtaccccttatcgaaccgggagcacaggatgacgcctaacaattcattcaagccgacaccgcttcgcggcgcggcttaattcaggagttaaacatcatgagggaagcggtgatcgccgaagtatcgactcaactatcagaggtagttggcgtcatcgagcgccatctcgaaccgacgttgctggccgtacatttgtacggctccgcagtggatggcggcctgaagccacacagtgatattgatttgctggttacggtgaccgtaaggcttgatgaaacaacgcggcgagctttgatcaacgaccttttggaaacttcggcttcccctggagagagcgagattctccgcgctgtagaagtcaccattgttgtgcacgacgacatcattccgtggcgttatccagctaagcgcgaactgcaatttggagaatggcagcgcaatgacattcttgcaggtatcttcgagccagccacgatcgacattgatctggctatcttgctgacaaaagcaagagaacatagcgttgccttggtaggtccagcggcggaggaactctttgatccggttcctgaacaggatctatttgaggcgctaaatgaaaccttaacgctatggaactcgccgcccgactgggctggcgatgagcgaaatgtagtgcttacgttgtcccgcatttggtacagcgcagtaaccggcaaaatcgcgccgaaggatgtcgctgccgactgggcaatggagcgcctgccggcccagtatcagcccgtcatacttgaagctaggcaggcttatcttggacaagaagatcgcttggcctcgcgcgcagatcagttggaagaatttgttcactacgtgaaaggcgagatcaccaaggtagtcggcaaataatgtctaacaattcgttcaagccgacgccgcttcgcggcgcggcttaactcaagcgttagagagctggggaagactatgcgcgatctgttgaaggtggttctaagcctcgtcttgcgatggcatttcgatccattcccattccgcgctcaagatggcttcccctcggcagttcatcagggctaaatcaatctagccgacttgtccggtgaaatgggctgcactccaacagaaacaatcaaacaaacatacacagcgacttattcacacgagctca

SEQ ID NO: 40 - DNA, 34862 bp, Artificial sequence
  plasmid pDAB9166
aattacaacggtatatatcctgccagtcagcatcatcacaccaaaagttaggcccgaatagtttgaaattagaaagctcgcaattgaggtctacaggccaaattcgctcttagccgtacaatattactcaccggatcctaaccggtttaattaaggcgcgccatgcccgggcaagcggccgcacaagtttgtacaaaaaagcaggcttctagacctaggtggagtcatcacgcagactatctcagcatgtgcgtagcacgcggccgcgaattcggaaatgggccaagtgaaatggaaatagagcttcaatccatttagtcccactcaaaatggtgctcgaattatatttagttacgttcgaatcagacaaccaagtatttggttaataaaaaccactcgcaacaaaggaaaaacaccaagcgcgtgcgtccaacatccgacggaaggggggtaatgtggtccgaaaaccttacaaaaatctgacgtcatctacccccgaaaacgttgaatcgtcaacgggggtagttttcgaattatcttttttttaggggcagttttattaatttgctctagaaattttatgattttaattaaaaaaagaaaaagaatatttgtatatttattttttatactctttttttgtccaactatttctcttattttggcaactttaactagactagtaacttatgtcaatgtgtatggatgcatgagagtgagtatacacatgtctaaatgcatgccttatgaaagcaacgcaccacaaaacgaagacccctttacaaatacatctcatcccttagtaccctcttactactgtcccgacacaaactcaaaacaaggatccacaaccaaaaatggcagcgaggctgcaagagcagaaaggaggtgagatggacacgaggattgcgatcataggcatgagcgccatacttccttgtggaaccacggtgagagagtcatgggagaccataagggctggcattgattgcctgtctgatcttcctgaggatcgtgttgatgtgactgcgtactttgacccagtcaagaccacaaaggacaaaatctactgcaagagaggaggtttcattcctgagtatgactttgatgcgcgtgagtttggtctcaacatgttccagatggaagattctgatgcgaatcagaccatctcacttctcaaggtcaaagaagcacttcaagatgctgggattgatgcacttggaaaggagaagaaaaacataggatgcgtgcttggcattggaggtggacagaagagttcacatgagttctacagcagactcaactatgtggttgtggagaaagtcttgagaaagatggggatgccagaggaagatgtcaaagtggctgtggagaagtacaaagcgaacttcccagaatggagacttgactctttccctggattccttgggaatgtcactgctggcagatgcaccaacacattcaacttggatggcatgaactgcgttgtggatgctgcatgtgcaagctccttgatagcagtcaaggttgcgattgatgaactgctctatggtgactgcgacatgatggtcactggtgcaacctgcacagacaactccattgggatgtacatggctttctcaaagacacctgtgttcagcacggacccaagtgtgagagcgtatgatgagaaaacgaaagggatgctcattggtgagggatcagccatgttggtgctcaaacgttatgcagatgcagtgagggatggtgatgagattcatgctgtgattcgtggttgtgcaagctcaagtgatggcaaagcagctggcatctacactcccacaatcagtggtcaagaggaagccttgagacgtgcatacaatcgtgcctgcgttgaccctgccactgtcactttggttgagggtcatgggactggcactccagttggagataggattgagttgactgcgttgaggaacttgtttgacaaagcgtatggtgaagggaacacagagaaagttgcagttggaagtatcaagtccagtattggtcatttgaaggctgttgctggtcttgctggaatgatcaaggtcatcatggctctcaaacacaagactttgcctggaacgatcaatgtggacaatccacccaatctctatgacaacactcccatcaatgagtcatccctctacatcaacacgatgaacagaccctggttccctccacctggtgttccgagacgtgctggaatatccagctttggctttggaggtgccaactaccatgcagtgttggaagaggctgaaccagagcacacgacagcgtacagactcaacaaacgtccacaaccggtgttgatgatggctgcaactcctgctgcgttgcagagcctttgtgaagctcagctgaaagagtttgaagctgcgatcaaggagaatgagacagtcaagaatactgcctacatcaagtgtgtcaagtttggagaacagttcaagttccctgggagcatacctgcgaccaatgcgagactgggattcttggtcaaagatgcggaggatgcgtgctccacgcttcgtgctatatgtgctcagtttgccaaagatgtgaccaaagaagcgtggaggcttccgagagaaggagtttctttccgtgccaaaggcattgccaccaatggtgctgttgctgcactcttctctggacaaggtgctcagtacacacacatgttcagtgaagttgcgatgaactggcctcagttcagacagtccattgctgcaatggacgctgcacagtccaaggttgctggaagtgacaaagactttgaaagagtctctcaagtcctgtacccaaggaaaccgtacgaacgtgagccagaacaagatcacaagaaaatctcactcacagcatacagccagccgtcaaccctggcatgtgctcttggtgcctttgagattttcaaggaagctggattcactccagactttgcagctggacacagcttgggtgagtttgctgcgctctatgcagctggttgtgttgacagagatgagttgtttgaacttgtttgcagaagggcaaggatcatgggaggcaaagatgcacctgccacacccaaaggttgcatggcagctgtcataggacccaacgcagagaacatcaaggttcaagctgccaacgtctggcttggaaactcaaactctccgtctcagactgtcattactgggtctgttgaagggattcaagctgaaagtgccagattgcagaaggaagggttcagagttgtgcctcttgcttgtgagtctgccttccattctccacagatggaaaatgccagctcagctttcaaagatgtcatatccaaggtttccttccgtacacccaaagcagaaacaaagctcttcagcaatgtttctggagagacctatccgacggatgccagagagatgctcactcaacacatgacctcatctgtgaagttcctgacccaagtgaggaacatgcaccaagctggtgcgagaatctttgttgagtttggaccgaaacaagttctcagcaaacttgtttctgaaaccctcaaagatgacccgtctgttgtcacagtgtctgtgaacccagcttctggcacggactctgacatacagttgagggatgctgcagttcagctggttgtggctggtgtcaatcttcaagggtttgacaagtgggatgctcctgatgccacgaggatgcaagccatcaagaaaaagagaaccacactcagactttcagctgccacctatgtcagtgacaagaccaagaaagtgagggatgctgccatgaacgacggaagatgtgtcacatacctcaagggtgctgcaccactcatcaaggctcctgaacctgtggttgacgaagctgccaagagggaggctgaaaggcttcagaaggagcttcaagacgctcagaggcagcttgacgacgccaaacgtgcagctgcagaagccaactccaaacttgctgctgccaaggaggaagccaagactgctgcagcttcagccaagcctgcagttgacactgctgttgtggagaaacatcgtgccatcctcaagtccatgctggctgagctggatggttatggaagtgttgatgcttcttcccttcagcaacagcaacagcaacagactgctccggcgcctgttaaagccgctgcccctgccgctcccgttgcaagtgctcctgctcccgccgtgtccaacgagttgcttgagaaagctgagacagttgtgatggaggttctcgctgccaagactggatacgaaacagacatgattgaggcggacatggagcttgagactgagttgggaattgacagcatcaagagggttgaaattctttctgaagtccaagctatgcttaacgttgaggcgaaagatgttgatgctctctctaggacgagaacagtgggtgaagttgtcaacgctatgaaggcagaaatcgctggttcttccgctccggcgccggcagctgccgcacctgcaccggctaaagcggctccagctgcagctgcaccagctgtttctaatgagctgctcgaaaaggcagaaactgttgtgatggaagtccttgctgccaaaactggctacgaaactgacatgatagaatcagacatggagcttgagacggagcttggaattgattccatcaagcgtgtggaaatcctcagtgaagtccaagccatgctcaatgtggaagctaaggatgtggatgctctctcaaggaccagaactgtcggtgaggttgtcaatgccatgaaggctgagatagctggaggctccgctcctgcgccggccgctgccgctcctggtcccgctgccgcggctccagctccagctgcagccgctccggccgtctcaaacgaactccttgaaaaagctgagaccgtcgtgatggaggtcttggcagctaaaaccggctatgagactgacatgattgagtctgacatggaattggagacagaacttgggatagacagcatcaaacgtgttgaaatcctcagtgaggtccaagctatgctgaacgtggaagcgaaggatgttgatgctctgtccagaacgaggaccgttggtgaggttgtggatgccatgaaggctgaaattgctggagggtctgcgcccgcgccagctgcagccgctcctgcacccgcagccgcggcacctgctccagctgcacctgcacctgccgtttcttcagaactcttggagaaggctgagacggttgtgatggaggttttggctgcaaagactggctatgagaccgacatgattgaatctgatatggaattggagacagagcttgggatcgattccatcaaaagagtggagatcctgagtgaagtccaagccatgctcaatgttgaagctaaggatgttgatgcactttcaagaacaaggacagtgggtgaggttgtggatgccatgaaggcggagattgctggagggagcgcgcctgcgccagctgccgcggcacctgcaccggcagccgcagctccagctccagctgcaccagcaccggccgcgcccgcgccagctgtttcatccgaactcctggaaaaggccgagacggttgtgatggaggtgctcgcagctaagactggttacgagaccgacatgattgaaagtgacatggagcttgaaaccgagttgggaatagatagcatcaaacgtgttgaaatcttgtctgaggtccaagctatgttgaacgtggaggcaaaagatgtcgatgcgctttcaagaaccagaacagtcggtgaggtcgtggacgccatgaaggctgaaattgccggaagctctgctagtgcgccagctgcagccgcacctgcacctgctgccgcggcacctgctccagctgcagccgctcctgccgtcagcaatgagttgctggagaaagccgaaacagttgtgatggaagtccttgctgcaaaaactggttacgaaacggacatgattgagtcagacatggaattggagaccgaacttggaatagattccatcaagagagtggagatcctctctgaggtgcaagccatgctcaacgttgaggctaaagatgttgatgcactcagtaggacaagaactgtgggggaagttgtcgatgcgatgaaggctgagattgctggaggctctgctcctgcgccggcagctgccgcacctgcacccgcagccgcggcaccagctgtcagcaacgaattgcttgagaaggctgaaacagttgtcatggaagtgctggctgcaaaaaccggctatgagactgacatgattgagtctgacatggaacttgagacggaattgggcattgacagcatcaagcgtgttgagatcctcagtgaagtccaagcaatgctcaatgtggaggctaaggatgtggatgccctctcaaggaccagaacagttggtgaggtcgttgatgcgatgaaggcggagatcgctggaagttccgcgcctgcgccagctgcagccgctcctgcacccgcagccgcggcaccggctccagctgcagccgcaccggccgtctcctcagaactcctggaaaaggctgagacagttgtgatggaagtccttgctgcgaaaactggctatgagaccgacatgattgaatctgacatggaactggagaccgagcttggaattgactccatcaaacgtgttgaaatcctctctgaggttcaagcgatgttgaatgtggaggccaaagatgttgatgctctttccagaacaaggacggtgggagaggtggttgatgccatgaaggctgagatagctgggggttctgctcctgcgccagctgcagccgctcctgctcccgctgccgcggcaccagctgtcagcaacgaactccttgaaaaagctgaaactgttgtgatggaggttttggctgcaaagactggatacgagactgacatgatagagtcagacatggagttggaaacagagcttgggattgatagcatcaagcgtgtggaaatcctttctgaggttcaagccatgctgaacgttgaggccaaagatgtcgatgctttgtcaaggaccagaacggttggagaagtggtcgatgccatgaaggctgagatagctggtggatcagcccctgctccggctgcagccgctcctgcaagtgccggtgctgcaccagctgtgaagattgattcagttcatggtgctgactgtgacgatttgtcactgatgcacgcaaaggtggttgacatcagaaggccagatgaactgattctggaaagaccggagaaccgtccagttcttgtcgttgacgatggctcagagttgacacttgctcttgtgagggtgttgggagcctgtgcagttgtcttgacctttgagggattgcagttggctcagagagctggtgcagctgccattcgtcatgttctggctaaggacctttcagcagaatcagctgagaaggccatcaaagaggctgagcaaagatttggagcgttgggaggcttcataagccagcaagcagaaaggtttgaaccagctgagatactgggtttcacactcatgtgtgcgaagtttgccaaagcctctctctgcactgctgtggctggaggtcgtcctgccttcatcggtgtggctaggcttgacggcagacttggattcacctctcaaggcacttctgacgcactcaagagagcacagcgtggagcgatctttggactctgcaagacaatagggttggagtggtcagaatctgatgtgttcagccgtggtgtggacattgctcaagggatgcacccagaagatgctgcagttgccatagttagggagatggcgtgtgctgacatcagaatcagagaggttgggattggagcaaaccagcaaagatgcacaatcagagctgccaagttggagactgggaaccctcagagacagatagcgaaagacgatgtgcttctggtttctggaggtgctcgtgggatcacacctctttgcatccgtgagatcacgcgtcagattgctggaggcaagtacattctgttgggtcgtagcaaagtttctgcgtctgaaccagcatggtgtgctggcatcactgatgagaaggctgtgcagaaagctgccacccaagagttgaagagggccttcagtgctggtgaaggacccaaacccactccaagggctgtcacgaaacttgtgggatctgttcttggtgctcgtgaagtgagaagctccattgctgccattgaagctctgggtggcaaagcgatctacagctcttgtgatgtgaactctgctgcagatgttgccaaagcagttagggatgcagagtcccagcttggtgccagagttagtggaatcgttcacgcttctggtgtgctccgtgatcgtctcatagagaagaaactccctgacgagtttgatgctgtctttgggaccaaagtcactgggttggagaatcttctggctgcagttgatcgtgccaacctcaaacacatggttctcttcagctcccttgctggtttccacggcaatgttggtcagtctgactatgcgatggcaaacgaagctctcaacaagatgggtttggaacttgcgaaggatgtcagtgtcaagtccatctgctttggtccctgggatggtgggatggtgacacctcaactcaagaaacagtttcaagaaatgggagttcagatcattcctcgtgaaggaggtgctgatacagttgcgaggattgtgttgggatcaagtcctgctgagatccttgttggaaactggaggacaccatccaagaaagttggaagtgacacgatcaccctgcatagaaagatcagtgccaagtccaatcccttcttggaggatcatgtcatacaaggcagaagggtgttgccaatgacccttgctattgggagccttgctgagacctgccttggactcttccctggctactctctctgggccatagatgacgcacagctcttcaaaggtgtcactgttgatggagacgtcaactgtgaagtgaccctcacaccgtccactgctccgagtgggagggtgaatgtccaagcgacgctcaagacgttctcaagtggaaaacttgttccagcctacagagctgtcatagtgttgtccaaccaaggtgctccacctgccaatgcaaccatgcagcctccgagccttgatgcagatcctgctttgcaagggtcagtctatgatggcaagactctctttcatggtcctgcgttcagaggcattgatgacgttctcagctgcaccaagagccagcttgttgccaagtgttctgctgttcctggatcagatgcagccagaggagagtttgcaactgacactgatgcacatgatccctttgtcaatgatcttgcctttcaagcaatgttggtctgggtgaggagaacgctgggacaagctgcactcccgaactccattcagaggatagtccaacacagaccggtcccacaagacaaacccttctacatcaccctcagatccaatcagagtggtggacatagccagcacaaacatgcacttcagttccacaacgaacaaggtgatctcttcattgatgttcaagcctctgtcattgcgacagactcacttgcgttctgagtagttagcttaatcacttaggtcaccctatcaaaatctatttagaaatacacaatattttgttgcaggcttgctggagaatcgatctgctatcataaaaattacaaaaaaattttatttgcctcaattattttaggattggtattaaggacgcttaaattatttgtcgggtcactacgcatcattgtgattgagaagatcagcgatacgaaatattcgtagtactatcgataatttatttgaaaattcataagaaaagcaaacgttacatgaattgatgaaacaatacaaagacagataaagccacgcacatttaggatattggccgagattactgaatattgagtaagatcacggaatttctgacaggagcatgtcttcaattcagcccaaatggcagttgaaatactcaaaccgccccatatgcaggagcggatcattcattgtttgtttggttgcctttgccaacatgggagtccaaggttgcggccgcttaattaagatgagtgatactcaggactcaggactcactctgctgatcactagtgctagcctcgaggtcgacacaactttgtatacaaaagttgtctagacctaggctcagcaactcatccagtcaagttcgagtcagtgagttgggcggccgcgaattcggaaatgggccaagtgaaatggaaatagagcttcaatccatttagtcccactcaaaatggtgctcgaattatatttagttacgttcgaatcagacaaccaagtatttggttaataaaaaccactcgcaacaaaggaaaaacaccaagcgcgtgcgtccaacatccgacggaaggggggtaatgtggtccgaaaaccttacaaaaatctgacgtcatctacccccgaaaacgttgaatcgtcaacgggggtagttttcgaattatcttttttttaggggcagttttattaatttgctctagaaattttatgattttaattaaaaaaagaaaaagaatatttgtatatttattttttatactctttttttgtccaactatttctcttattttggcaactttaactagactagtaacttatgtcaatgtgtatggatgcatgagagtgagtatacacatgtctaaatgcatgccttatgaaagcaacgcaccacaaaacgaagacccctttacaaatacatctcatcccttagtaccctcttactactgtcccgacacaaactcaaaacaaggatccacaaccaaaaatggctgcaaggaacgtgagtgcggctcatgagatgcatgacgagaagaggatagctgttgtgggcatggctgttcagtatgctggatgcaaaacgaaagacgagttctgggaagttctcatgaatggaaaagttgagagcaaagtgatcagcgacaaacgtcttggttcaaattaccgtgctgaacactacaaagctgaaaggagcaagtatgctgacaccttctgcaatgagacatatggaactcttgatgagaacgaaatagacaatgagcatgaactccttttgaaccttgccaaacaagccttggctgaaacatctgtcaaagattcaacaagatgtggcatagtttctggatgcctcagcttcccgatggacaacctccaaggtgaactcttgaatgtgtaccagaaccatgttgagaagaaacttggtgccagagttttcaaagatgcctctcactggtcagaaagagaacagtccaacaaaccagaggctggtgacagaagaatcttcatggaccctgcttcctttgttgctgaggaactcaatcttggcgctctccactactctgttgatgctgcctgtgccactgcgctctatgtgctcagactggcgcaagatcacttggtctctggtgcagctgatgtgatgctttgtggtgcaacatgcctgccggagccgtttttcatactctctgggttctcaaccttccaagccatgcctgttggaacgggtcagaatgtgtccatgccgctgcacaaagattctcaaggattgacccctggtgaaggaggttccatcatggtcctcaaacgtttggatgacgcaatcagagatggagatcacatctatggaacacttttgggagccaatgtcagcaacagtggcactggtctgccacttaaaccccttttgccgtcagagaaaaagtgcctcatggacacctacacacgtatcaatgtgcatccccacaagattcagtatgttgaatgccatgcaactgggactccacaaggtgatcgtgtggaaattgatgctgtgaaggcttgctttgaaggcaaagtcccacgttttggaaccacaaaagggaactttggacacacattggtggcagctgggtttgctggcatgtgcaaagtgcttctctccatgaagcacgggatcattccacccactccgggaatagatgacgaaacgaagatggaccctctggttgtctctggtgaggccattccctggccagaaacgaatggagaaccgaagcgtgctggtctctcagcgtttggatttggtgggaccaatgctcatgctgtctttgaggaacatgacccaagcaatgctgcatgcactggccatgactccatttctgctctctctgcacgttgtggtggtgagtcaaacatgagaatagcaatcactgggatggatgccacttttggtgctttgaaaggattggatgcttttgaaagggccatctacactggtgctcatggtgctataccactcccagaaaagagatggagattcctggggaaagacaaggacttccttgatctttgtggagtcaaagcaacaccgcatggctgttacattgaagatgttgaagttgatttccagaggctgaggactccaatgactcctgaagatatgctcttgcctcaacagcttctggctgtcaccacaattgatagggccatattggactctggcatgaagaaaggtggaaatgtggctgtctttgtggggttggggaccgatcttgaactctaccgtcaccgtgcaagggttgctctcaaggagagagtgaggcctgaagccagcaagaaactcaatgacatgatgcagtacatcaatgattgtgggacaagcacttcttacaccagctacataggcaacttggttgcaacaagggtcagttcacaatggggcttcacgggaccttccttcacaatcacagaaggcaacaattctgtgtacagatgtgctgaacttggcaaatacctcttggaaacgggagaggttgatggggttgtggttgcgggtgttgatctctgtgggagtgctgagaacctttacgtcaagtcaaggcgtttcaaggtgtctacatctgacaccccgagagccagctttgatgcagctgctgatggttactttgttggagagggctgtggtgcatttgtgctcaagcgtgagacaagctgcaccaaggatgacagaatctatgcttgcatggatgccatagttcctggaaatgttccatctgcatgtttgagagaggcattggatcaagccagagtcaagcctggagacatcgagatgttggagctttctgctgattcagcgaggcatttgaaggacccgtctgttctcccaaaggaactcactgctgaggaagagattggcggacttcagacgattcttcgtgacgatgacaagctcccaaggaatgttgcaactggaagtgtcaaggccactgttggtgacactggttatgcttctggtgctgccagtttgattaaggctgcgctttgcatctacaaccgttacctgcccagcaatggagatgactgggatgaacctgcacctgaagcaccctgggacagcacactctttgcgtgccagacctcaagagcttggttgaagaaccctggtgagagacgttatgcggctgtttccggagtcagtgaaaccagaagttgctacagtgtgctgctttctgaagcagagggacactacgagagagagaacagaatcagtttggatgaggaagcacccaagctcattgtgttgagagcagactcccatgaagagattcttggaagattggacaagataagggaaaggttcttgcagcccacgggtgctgcacccagagagtctgaattgaaggcgcaagcccgtaggatctttcttgaactccttggtgagacccttgcccaagatgcagcttcatctggaagtcagaagccccttgctctcagcttggtctccactccatccaagctccagagagaggtggaacttgcggcaaaaggcattccgagatgtctcaagatgagacgtgattggagttcccctgctggaagcagatatgcgcctgagcctttggccagtgacagagttgccttcatgtatggagaaggaaggagcccttactatggcatcacacaagacattcataggatttggcctgaacttcatgaggtcatcaatgagaaaacaaaccgtctctgggctgaaggtgacagatgggtcatgccaagggccagcttcaagagtgagcttgagtcacaacagcaagagtttgacagaaacatgattgaaatgttccgtcttggaatcctcacctcaattgccttcacaaacctggcgagagatgttctcaacatcacgcccaaagcagcctttggactcagtttgggagagatttccatgatctttgctttctccaagaaaaacggtttgataagcgatcagttgacaaaggatttgagagagtcagatgtctggaacaaagctctggctgttgagttcaatgcgctcagagaagcctggggcattccacagtctgtcccaaaagatgagttctggcaaggttacatagtgaggggaacgaaacaagacatagaagcagccatagcaccagactcaaagtatgtgaggttgaccatcatcaatgatgccaacactgctctcatcagtggaaagcctgatgcatgcaaagctgcgattgctcgtcttggtggcaacatccctgcgcttccagtcactcaaggcatgtgtgggcattgcccagaggtgggaccttacaccaaggacatcgcaaagatccacgccaaccttgagttccctgtggttgatggtcttgatctctggactaccataaaccagaagaggcttgtgccaagagccacgggtgccaaagatgaatgggctccttcatcctttggggagtatgctggacagctctatgagaaacaagccaacttccctcagatagttgaaaccatctacaagcagaactatgatgtgtttgttgaagttgggccaaacaatcacagaagcacagcagtgagaaccacgcttggaccacagagaaaccaccttgctggtgccatagacaagcagaacgaggatgcttggacgacaatagtcaagctcgtggcttcattgaaggctcaccttgttcctggagtgaccatcagtccgctctaccactccaagctcgttgcagaggctgaggcttgttatgctgcgctctgtaaaggtgagaaacccaagaaaaacaagtttgtgagaaagattcagttgaatggcagattcaacagcaaggcagaccccatctcctcagcagaccttgcatccttcccacctgcggaccctgcgattgaagctgccatctcttcaaggatcatgaagcctgtggctccgaaattctatgcgcgtctcaacattgatgagcaagatgagaccagagatccgatcttgaacaaggacaatgcgccttccagctccagctcttccagcagttcctcttccagcagttcatctccgtctcctgctccttcagctccagttcagaagaaagctgccccagctgcggagacaaaagctgttgccagtgctgatgcacttcgtagtgccctgcttgatcttgactccatgcttgcgctcagctctgcaagtgcttctggcaaccttgttgagactgcgccatctgatgccagtgtcattgtccctccgtgcaacattgctgatcttggcagcagagctttcatgaaaacttatggtgtttctgcgcctctgtacaccggtgcaatggccaagggaattgcctctgcggacttggtgatcgcagctggaaggcaaggaatccttgcgtcatttggtgctggaggccttccaatgcaagttgtgcgtgagtccattgaaaagattcaagctgccctgcccaatggaccatatgctgtcaacctcatccattctccttttgacagcaaccttgagaagggaaatgttgatctcttcttggaaaagggtgtcacttttgttgaggcttcagccttcatgacgttgacaccgcaagttgtcagatacagagcggctgggttgacgaggaatgcagatgggtcagtcaacataaggaacagaatcattgggaaagtctccagaactgagctggctgaaatgttcatgcgtcctgcacctgagcatcttttgcagaagctcattgcttctggggagatcaatcaagaacaagctgagttggccagacgtgttcctgtggctgatgacattgcggttgaagctgattctggtggacacactgacaaccgtccaatccatgtcattctgcctctgattatcaacctgagggataggcttcacagagagtgtggatacccagcaaacctgagggttcgtgttggtgctgggggtggcattgggtgtccccaagctgcgctggcaactttcaacatgggtgcctctttcattgtcactggaacagtgaaccaagttgccaaacaatctgggacgtgtgacaatgtgaggaaacagcttgcgaaagcaacttactcagatgtttgcatggcaccggcagctgacatgtttgaggaaggtgtgaaacttcaagttttgaagaaaggaacaatgttcccttcaagagccaacaaactctatgagttgttctgcaagtatgattcttttgagtccatgcctccagcagagcttgcgagggttgagaaaagaatcttcagtcgtgcattggaagaggtctgggatgagaccaagaacttctacatcaaccgtctccacaacccagagaagatacagagggctgagagggaccccaaactgaagatgtcactgtgtttcagatggtatctgtccctggcttcaaggtgggccaacactggagcttctgacagagtcatggactaccaagtttggtgtggtcctgccattggttcattcaatgatttcatcaaaggaacttaccttgatccggcagtggcaaatgagtacccgtgtgttgtgcagatcaacaaacagattcttagaggagcgtgcttcttgaggcgtcttgaaatactgagaaatgcaaggctttcagatggtgcagctgcacttgtggcgagcattgatgacacatatgtccctgctgagaagctgtgagtagttagcttaatcacttaggtcaccctatcaaaatctatttagaaatacacaatattttgttgcaggcttgctggagaatcgatctgctatcataaaaattacaaaaaaattttatttgcctcaattattttaggattggtattaaggacgcttaaattatttgtcgggtcactacgcatcattgtgattgagaagatcagcgatacgaaatattcgtagtactatcgataatttatttgaaaattcataagaaaagcaaacgttacatgaattgatgaaacaatacaaagacagataaagccacgcacatttaggatattggccgagattactgaatattgagtaagatcacggaatttctgacaggagcatgtcttcaattcagcccaaatggcagttgaaatactcaaaccgccccatatgcaggagcggatcattcattgtttgtttggttgcctttgccaacatgggagtccaaggttgcggccgcttaattaatctgacctgaccactagacctgagtgagtacagatgtgctactagtgctagcctcgaggtcgaccaacttttctatacaaagttgtctagacctaggactaggcactgagtgactcactgacctgactgagtgactggcggccgcgcggccgcgaattcggaaatgggccaagtgaaatggaaatagagcttcaatccatttagtcccactcaaaatggtgctcgaattatatttagttacgttcgaatcagacaaccaagtatttggttaataaaaaccactcgcaacaaaggaaaaacaccaagcgcgtgcgtccaacatccgacggaaggggggtaatgtggtccgaaaaccttacaaaaatctgacgtcatctacccccgaaaacgttgaatcgtcaacgggggtagttttcgaattatcttttttttaggggcagttttattaatttgctctagaaattttatgattttaattaaaaaaagaaaaagaatatttgtatatttattttttatactctttttttgtccaactatttctcttattttggcaactttaactagactagtaacttatgtcaatgtgtatggatgcatgagagtgagtatacacatgtctaaatgcatgccttatgaaagcaacgcaccacaaaacgaagacccctttacaaatacatctcatcccttagtaccctcttactactgtcccgacacaaactcaaaacaaggatccacaaccaaaaatggcgcttcgtgtcaagaccaacaagaagccatgttgggagatgaccaaggaggaactgacctctggcaaaactgaggtgttcaactatgaggaactcctggagtttgcagagggtgacatagctaaggtttttggtccggagtttgctgtcatagacaagtaccccagaagggtgaggctgcctgctcgtgaatacctgcttgtgacaagggtcacactcatggatgccgaggtcaacaactacagagttggtgccagaatggtcactgagtatgatcttccagtgaatggcgaattgtctgagggaggtgattgtccctgggcagttctggttgagagtggacagtgcgatttgatgctgatatcatacatgggaattgatttccagaaccaaggtgacagagtttaccgtctgctcaacaccacgttgacattctatggggttgcccatgagggagagacccttgagtatgacatcagagtgaccggttttgccaaacgtttggatggtggcatctccatgttcttctttgagtatgactgctatgtcaatgggaggcttctcattgagatgagagatggctgtgctggcttcttcacaaatgaggagcttgatgcgggaaagggtgtggtgttcacaagaggggatttggctgccagagctaagattccaaagcaagatgtttctccctatgctgtcgctccctgccttcacaaaacaaaactcaacgaaaaggagatgcagaccttggttgacaaagattgggcttccgtttttggctcaaagaatggcatgccggagatcaactacaaactctgcgcacgtaagatgctcatgattgatagagtcaccagcattgaccataagggaggtgtgtacggtttgggtcagttggttggtgagaaaatcttggagagggaccattggtacttcccatgccattttgttaaggatcaagtcatggctggatctcttgtcagcgacggttgttcacaaatgctcaagatgtacatgatctggctcggtttgcaccttaccaccggaccatttgacttcagacccgtcaacggacacccgaacaaagttaggtgtaggggtcagatatctcctcataagggaaagttggtctacgtcatggagatcaaagagatgggattcgacgaggataacgatccgtacgccattgctgacgtcaacatcattgacgttgatttcgaaaagggtcaagatttcagccttgatagaatcagcgactacggaaagggggatcttaacaaaaagatcgtcgtggacttcaagggcattgctctcaagatgcagaagagatccacgaacaagaacccctccaaagttcagcccgtttttgctaacggtgcagccactgtgggaccggaagcgtccaaggccagctctggtgccagtgctagtgcttctgctgcccctgcgaagcctgctttctcagcagatgttcttgcgccaaagccagttgcacttcctgaacatatcctcaagggtgacgctctcgctccgaaagaaatgtcctggcatcccatgtcaaaacttcctggcaacccgacgccgttcttctcccctagttcttaccctccgagggcaatttgcttcatccctttccctggcaacccacttgacaacaattgcaaagctggagaaatgcctctgaactggtacaacatgtcagagttcatgtgtggaaaagttagcaactgcttgggaccagagttcgcaagatttgataagtcaaatacgagcagaagccctgcttttgatttggctcttgtgactagagttgttgaagtcacaaacatggaacatggcaagttcctgaatgttgattgcaatcccagcaaaggcacaatggtgggggagtttgactgtcctcaagatgcgtggttctttgatggttcttgcaatgatgggcacatgccttattccatcatcatggaaatcggacttcagacatccggtgttctcaccagtgtgttgaaagcaccactgacgatggacaaagatgacattctctttaggaaccttgatgcaagtgctgaaatggtgaggccagatgtggatgtgagggggaaaaccataaggaatgtgaccaagtgcactggatatgcaatgttgggaaagatggggattcacagattcacgtttgagttgtctgttgatggcgtggttttctacaaaggaagcacttcctttggatggttcactccagaggtgtttgctcagcaagctggacttgacaatgggaaaaagacggagccttggtgcaaaactaacaacacgagtgtgagaagagttgaaatcgcatcagccaaaggcaaagaacagctgactgagaaacttccagatgcaactaatgctcaagttctcagaaggtcagaacagtgtgagtatttggattacctcaacattgctcctgattctgggctgcatgggaaaggatatgcgcatggacacaaagatgttaacccacaagactggttcttctcttgtcacttttggtttgatcctgtgatgcctggatctttgggaattgagtcaatgttccagctcattgaggcatttgcggtggaccagaacataccgggagaatacaatgtgagcaatccgacctttgcccatgcccctggaaaaacggcgtggaagtaccgtggtcaattgacaccaaagaaccgtgcgatggactgtgaggtgcacatagtttcaatcacagcctctcctgaaaatggaggctacgttgacatagtggcagatggagcactttgggttgatggtctccgtgtgtatgaagccaaagaactcagagttcgtgttgtcagtgcaaaacctcaagccattccggatgttcaacaacagccacccagcgcaaaagcggaccctgggaaaactggagttgcactcagtccgactcagttgagagatgtcctgcttgaagtggacaatccattgtatcttggtgttgaaaactccaatttggtgcagtttgaatccaaacctgcaacttcttcaaggattgtcagtatcaaaccatgctccataagtgatcttggtgacaagtccttcatggaaacgtacaatgtgtcagcacctctgtacactggagcaatggccaagggaattgcgtctgcggaccttgtcattgctgctgggaagaggaagatattgggttcttttggagcgggtgggcttccaatgcaccatgtgagggcagctttggagaagatacaagcggctctgcctcaaggaccatatgctgtgaacctcattcattcaccttttgacagcaacttggaaaaggggaatgttgatctcttcctcgaaaagggcgttactgtggtggaggcttctgcattcatgaccctcactccccaagttgttcgttaccgtgcagccggactctcaaggaacgctgatgggagtgtcaacatcagaaaccgtatcattggaaaagtgtccagaacagaactcgccgaaatgttcatcagaccggctccggaacacctccttgagaaactcatagcttctggtgagataacacaagaacaagccgaacttgcccgtcgtgttcctgtcgcagacgacatcgctgttgaagctgattctggtggtcacactgacaaccgtcccatccacgtcatcttgcctttgatcatcaaccttaggaacagactgcacagagagtgtggttatcctgcgcaccttagagtcagagttggagctggaggcggtgttggctgcccacaagctgctgcggctgccctcacaatgggagctgccttcatagtgactgggactgtcaatcaagttgctaaacagtccgggacatgtgacaacgtgagaaaacaactcagtcaagccacctacagtgacatttgcatggctccagcagctgatatgtttgaggaaggtgtgaaactccaagttctcaagaagggaacaatgttcccatcaagagctaacaaattgtacgaactcttttgcaagtacgactctttcgattcaatgcctcctgctgaacttgaaaggatcgagaagaggatcttcaagagggcacttcaagaggtctgggaagagaccaaggacttttacatcaatggtttgaagaatccagagaagatacagagagcggaacatgaccccaaactcaagatgtctttgtgtttcagatggtatcttggtcttgcatcacgttgggccaacatgggtgctcctgatcgtgtcatggactatcaagtctggtgtggtccagccattggagccttcaatgacttcatcaaaggaacatatcttgatcctgctgtctctaatgagtacccatgtgttgtccagatcaaccttcagattttgcgtggtgcatgttacctgaggcgtcttaatgctctgagaaatgatccgaggattgatcttgagactgaagatgctgcctttgtctatgagccaacgaatgcgctttgagtagttagcttaatcacttaggtcaccctatcaaaatctatttagaaatacacaatattttgttgcaggcttgctggagaatcgatctgctatcataaaaattacaaaaaaattttatttgcctcaattattttaggattggtattaaggacgcttaaattatttgtcgggtcactacgcatcattgtgattgagaagatcagcgatacgaaatattcgtagtactatcgataatttatttgaaaattcataagaaaagcaaacgttacatgaattgatgaaacaatacaaagacagataaagccacgcacatttaggatattggccgagattactgaatattgagtaagatcacggaatttctgacaggagcatgtcttcaattcagcccaaatggcagttgaaatactcaaaccgccccatatgcaggagcggatcattcattgtttgtttggttgcctttgccaacatgggagtccaaggttgcggccgcttaattaatcacgagtggatgactgtcacgactgactcatgactgactactagtgctagcctcgaggtcgacacaactttgtataataaagttgtctagacctaggagctgtgctgggtaactcacatgagtcactggtcacatcagcggccgcgaattcggaaatgggccaagtgaaatggaaatagagcttcaatccatttagtcccactcaaaatggtgctcgaattatatttagttacgttcgaatcagacaaccaagtatttggttaataaaaaccactcgcaacaaaggaaaaacaccaagcgcgtgcgtccaacatccgacggaaggggggtaatgtggtccgaaaaccttacaaaaatctgacgtcatctacccccgaaaacgttgaatcgtcaacgggggtagttttcgaattatcttttttttaggggcagttttattaatttgctctagaaattttatgattttaattaaaaaaagaaaaagaatatttgtatatttattttttatactctttttttgtccaactatttctcttattttggcaactttaactagactagtaacttatgtcaatgtgtatggatgcatgagagtgagtatacacatgtctaaatgcatgccttatgaaagcaacgcaccacaaaacgaagacccctttacaaatacatctcatcccttagtaccctcttactactgtcccgacacaaactcaaaacaaggatccacaaccaaaaatgcttcagcacacttggcttccgaagcctcccaatctgaccctcttgtcagatgaggttcatctctggaggattcctcttgaccagcctgagtcacaacttcaagaccttgctgccaccctgagcagtgatgaattggcgagggcaaacagattctactttccagaacacagaaggcgtttcactgctgggagaggcatcctcagatccatcttgggtggatacttgggagtggaaccgggtcaagtcaagtttgattatgagtcccgtgggaaaccgatccttggtgacagatttgctgagagtggactcctgttcaacttgtctcacagccagaaccttgccttgtgtgctgtcaactacacgcgtcaaataggcattgatcttgaatatctgcgtccaacatctgacttggagtctcttgcaaagaggttctttctcccaagagaatatgaactcttgaggtcactccctgatgagcagaaacagaagattttctttcgttactggacttgcaaagaggcttatctcaaagcaacgggagatggaatagccaaacttgaagagatcgagatagcactcaccccaacagaacctgccaagctccaaacagctcctgcgtggtctctgttggagcttgtgccagatgacaattgtgttgcagctgtggctgttgcgggttttggttggcagcccaagttctggcattactgagtagttagcttaatcacttaggtcaccctatcaaaatctatttagaaatacacaatattttgttgcaggcttgctggagaatcgatctgctatcataaaaattacaaaaaaattttatttgcctcaattattttaggattggtattaaggacgcttaaattatttgtcgggtcactacgcatcattgtgattgagaagatcagcgatacgaaatattcgtagtactatcgataatttatttgaaaattcataagaaaagcaaacgttacatgaattgatgaaacaatacaaagacagataaagccacgcacatttaggatattggccgagattactgaatattgagtaagatcacggaatttctgacaggagcatgtcttcaattcagcccaaatggcagttgaaatactcaaaccgccccatatgcaggagcggatcattcattgtttgtttggttgcctttgccaacatgggagtccaaggttgcggccgcttaattaactactgtcactgaggccgtagacgagtacggactgatctaactagtgctagcctcgaggtcgacacccagctttcttgtacaaagtggttgcggccgcttaattaaatttaaattcaattaatgcaatcttgattttcaacaacgaaggtaatggcgtaaaagaaaaaatgtatgttattgtattgatctttcatgatgttgaagcgtgccataatatgatgatgtataattaaaatattaactgtcgcattttattgaaatggcactgttatttcaaccatatctttgattctgttacatgacacgactgcaagaagtaaataatagacgccgttgttaaagaattgctatcatatgtgcctaactagagggaatttgagcgtcagacctaatcaaatattacaaaatatctcactctgtcgccagcaatggtgtaatcagcgcagacaaatggcgtaaagatcgcggaaaaacctccccgagtggcatgatagctgcctctgtattgctgatttagtcagccttatttgacttaagggtgccctcgttagtgacaaattgctttcaaggagacagccatgccccacactttgttgaaaaacaaattgcctttggggagacggtaaagccagttgctcttcaataaggaatgtcgaggaggcaatgtaaccgcctctggtagtacacttctctaatccaaaaatcaatttgtattcaagataccgcaaaaaacttatggtttaaaccctgcaggactagtccagaaggtaattatccaagatgtagcatcaagaatccaatgtttacgggaaaaactatggaagtattatgtaagctcagcaagaagcagatcaatatgcggcacatatgcaacctatgttcaaaaatgaagaatgtacagatacaagatcctatactgccagaatacgaagaagaatacgtagaaattgaaaaagaagaaccaggcgaagaaaagaatcttgaagacgtaagcactgacgacaacaatgaaaagaagaagataaggtcggtgattgtgaaagagacatagaggacacatgtaaggtggaaaatgtaagggcggaaagtaaccttatcacaaaggaatcttatcccccactacttatccttttatatttttccgtgtcatttttgcccttgagttttcctatataaggaaccaagttcggcatttgtgaaaacaagaaaaaatttggtgtaagctattttctttgaagtactgaggatacaacttcagagaaatttgtaagtttgtaggtaccagatctggatcccaaaccatgtctccggagaggagaccagttgagattaggccagctacagcagctgatatggccgcggtttgtgatatcgttaaccattacattgagacgtctacagtgaactttaggacagagccacaaacaccacaagagtggattgatgatctagagaggttgcaagatagatacccttggttggttgctgaggttgagggtgttgtggctggtattgcttacgctgggccctggaaggctaggaacgcttacgattggacagttgagagtactgtttacgtgtcacataggcatcaaaggttgggcctaggatctacattgtacacacatttgcttaagtctatggaggcgcaaggttttaagtctgtggttgctgttataggccttccaaacgatccatctgttaggttgcatgaggctttgggatacacagcccggggtacattgcgcgcagctggatacaagcatggtggatggcatgatgttggtttttggcaaagggattttgagttgccagctcctccaaggccagttaggccagttacccaaatctgagtagttagcttaatcacctagagctcgatcggcggcaatagcttcttagcgccatcccgggttgatcctatctgtgttgaaatagttgcggtgggcaaggctctctttcagaaagacaggcggccaaaggaacccaaggtgaggtgggctatggctctcagttccttgtggaagcgcttggtctaaggtgcagaggtgttagcgggatgaagcaaaagtgtccgattgtaacaagatatgttgatcctacgtaaggatattaaagtatgtattcatcactaatataatcagtgtattccaatatgtactacgatttccaatgtctttattgtcgccgtatgtaatcggcgtcacaaaataatccccggtgactttcttttaatccaggatgaaataatatgttattataatttttgcgatttggtccgttataggaattgaagtgtgcttgaggtcggtcgccaccactcccatttcataattttacatgtatttgaaaaataaaaatttatggtattcaatttaaacacgtatacttgtaaagaatgatatcttgaaagaaatatagtttaaatatttattgataaaataacaagtcaggtattatagtccaagcaaaaacataaatttattgatgcaagtttaaattcagaaatatttcaataactgattatatcagctggtacattgccgtagatgaaagactgagtgcgatattatggtgtaatacataggaattcgtttaaacgatctgcgtctaattttcggtccaacttgcacaggaaagacgtcgaccgcggtagctcttgcccagcagactgggcttccagtcctttcgctcgatcgggtccaatgttgtcctcagctgtgaaccggaagcggacgaccaacagtggaagaactgaaaggaacgagccgtctataccttgatgatcggcctctggtgaagggtatcatcgcagccaagcaagctcatgaaaggctgatgggggaggtgtataattatgaggcccacggcgggcttattctttagggaggatctatctcgttgctcaagtgcatggcgcaaagcagttattggagtgcggattttcgttggcatattattcgccacgagttagcagacgaagagaccttcatgaacgtggccaaggccagagttaagcagatgttacgccctgctgcaggcctttctattatccaatagttggttgatctttggaaagagcctcggctgaggcccatactgaaagagatcgatggatatcgatatgccatgttgtttgctagccagaaccagatcacatccgatatgctattgcagcttgacgcagatatggaggataagttgattcatgggatcgctcaggagtagctcatccatgcacgccgacaagaacagaaattccgtcgagttaacgcagccgcttacgacggattcgaaggtcatccattcggaatgtattagtttgcaccagctccgcgtcacacctgtcttcatttgaataagatgttagcaattgtttttagctttgtcttgttgtggcagggcggcaagtgcttcagacatcattctgttttcaaattttatgctggagaacagcttcttaattcctttggaaataatagactgcgtcttaaaattcagatgtctggatatagatatgattgtaaaataacctatttaagtgtcatttagaacataagttttatgaatgttcttccattttcgtcatcgaacgaataagagtaaatacaccttttttaacattacaaataagttcttatacgttgtttatacaccgggaatcatttccattattttcgcgcaaaagtcacggatattcgtgaaagcgacataaactgcgaaatttgcggggagtgtcttgagtttgcctcgaggctagcgcatgcacatagacacacacatcatctcattgatgcttggtaataattgtcattagattgtttttatgcatagatgcactcgaaatcagccaattttagacaagtatcaaacggatgtgacttcagtacattaaaaacgtccgcaatgtgttattaagttgtctaagcgtcaatttgatttacaattgaatatatcctgccccagccagccaacagctcgatttacaattgaatatatcctgccggccggcccacgcgtgtcgaggaattctgatctggcccccatttggacgtgaatgtagacacgtcgaaataaagatttccgaattagaataatttgtttattgctttcgcctataaatacgacggatcgtaatttgtcgttttatcaaaatgtactttcattttataataacgctgcggacatctacatttttgaattgaaaaaaaattggtaattactctttctttttctccatattgaccatcatactcattgctgatccatgtagatttcccggacatgaagccatttacaattgaatatatcctgccgccgctgccgctttgcacccggtggagcttgcatgttggtttctacgcagaactgagccggttaggcagataatttccattgagaactgagccatgtgcaccttccccccaacacggtgagcgacggggcaacggagtgatccacatgggacttttaaacatcatccgtcggatggcgttgcgagagaagcagtcgatccgtgagatcagccgacgcaccgggcaggcgcgcaacacgatcgcaaagtatttgaacgcaggtacaatcgagccgacgttcacgcggaacgaccaagcaagcttggctgccatttttggggtgaggccgttcgcggccgaggggcgcagcccctggggggatgggaggcccgcgttagcgggccgggagggttcgagaagggggggcaccccccttcggcgtgcgcggtcacgcgcacagggcgcagccctggttaaaaacaaggtttataaatattggtttaaaagcaggttaaaagacaggttagcggtggccgaaaaacgggcggaaacccttgcaaatgctggattttctgcctgtggacagcccctcaaatgtcaataggtgcgcccctcatctgtcagcactctgcccctcaagtgtcaaggatcgcgcccctcatctgtcagtagtcgcgcccctcaagtgtcaataccgcagggcacttatccccaggcttgtccacatcatctgtgggaaactcgcgtaaaatcaggcgttttcgccgatttgcgaggctggccagctccacgtcgccggccgaaatcgagcctgcccctcatctgtcaacgccgcgccgggtgagtcggcccctcaagtgtcaacgtccgcccctcatctgtcagtgagggccaagttttccgcgaggtatccacaacgccggcggccgcggtgtctcgcacacggcttcgacggcgtttctggcgcgtttgcagggccatagacggccgccagcccagcggcgagggcaaccagcccggtgagcgtcggaaagggtcgacggatcttttccgctgcataaccctgcttcggggtcattatagcgattttttcggtatatccatcctttttcgcacgatatacaggattttgccaaagggttcgtgtagactttccttggtgtatccaacggcgtcagccgggcaggataggtgaagtaggcccacccgcgagcgggtgttccttcttcactgtcccttattcgcacctggcggtgctcaacgggaatcctgctctgcgaggctggccggctaccgccggcgtaacagatgagggcaagcggatggctgatgaaaccaagccaaccaggaagggcagcccacctatcaaggtgtactgccttccagacgaacgaagagcgattgaggaaaaggcggcggcggccggcatgagcctgtcggcctacctgctggccgtcggccagggctacaaaatcacgggcgtcgtggactatgagcacgtccgcgagctggcccgcatcaatggcgacctgggccgcctgggcggcctgctgaaactctggctcaccgacgacccgcgcacggcgcggttcggtgatgccacgatcctcgccctgctggcgaagatcgaagagaagcaggacgagcttggcaaggtcatgatgggcgtggtccgcccgagggcagagccatgacttttttagccgctaaaacggccggggggtgcgcgtgattgccaagcacgtccccatgcgctccatcaagaagagcgacttcgcggagctggtattcgtgcagggcaagattcggaataccaagtacgagaaggacggccagacggtctacgggaccgacttcattgccgataaggtggattatctggacaccaaggcaccaggcgggtcaaatcaggaataagggcacattgccccggcgtgagtcggggcaatcccgcaaggagggtgaatgaatcggacgtttgaccggaaggcatacaggcaagaactgatcgacgcggggttttccgccgaggatgccgaaaccatcgcaagccgcaccgtcatgcgtgcgccccgcgaaaccttccagtccgtcggctcgatggtccagcaagctacggccaagatcgagcgcgacagcgtgcaactggctccccctgccctgcccgcgccatcggccgccgtggagcgttcgcgtcgtctcgaacaggaggcggcaggtttggcgaagtcgatgaccatcgacacgcgaggaactatgacgaccaagaagcgaaaaaccgccggcgaggacctggcaaaacaggtcagcgaggccaagcaggccgcgttgctgaaacacacgaagcagcagatcaaggaaatgcagctttccttgttcgatattgcgccgtggccggacacgatgcgagcgatgccaaacgacacggcccgctctgccctgttcaccacgcgcaacaagaaaatcccgcgcgaggcgctgcaaaacaaggtcattttccacgtcaacaaggacgtgaagatcacctacaccggcgtcgagctgcgggccgacgatgacgaactggtgtggcagcaggtgttggagtacgcgaagcgcacccctatcggcgagccgatcaccttcacgttctacgagctttgccaggacctgggctggtcgatcaatggccggtattacacgaaggccgaggaatgcctgtcgcgcctacaggcgacggcgatgggcttcacgtccgaccgcgttgggcacctggaatcggtgtcgctgctgcaccgcttccgcgtcctggaccgtggcaagaaaacgtcccgttgccaggtcctgatcgacgaggaaatcgtcgtgctgtttgctggcgaccactacacgaaattcatatgggagaagtaccgcaagctgtcgccgacggcccgacggatgttcgactatttcagctcgcaccgggagccgtacccgctcaagctggaaaccttccgcctcatgtgcggatcggattccacccgcgtgaagaagtggcgcgagcaggtcggcgaagcctgcgaagagttgcgaggcagcggcctggtggaacacgcctgggtcaatgatgacctggtgcattgcaaacgctagggccttgtggggtcagttccggctgggggttcagcagccagcgctttactggcatttcaggaacaagcgggcactgctcgacgcacttgcttcgctcagtatcgctcgggacgcacggcgcgctctacgaactgccgataaacagaggattaaaattgacaattgtgattaaggctcagattcgacggcttggagcggccgacgtgcaggatttccgcgagatccgattgtcggccctgaagaaagctccagagatgttcgggtccgtttacgagcacgaggagaaaaagcccatggaggcgttcgctgaacggttgcgagatgccgtggcattcggcgcctacatcgacggcgagatcattgggctgtcggtcttcaaacaggaggacggccccaaggacgctcacaaggcgcatctgtccggcgttttcgtggagcccgaacagcgaggccgaggggtcgccggtatgctgctgcgggcgttgccggcgggtttattgctcgtgatgatcgtccgacagattccaacgggaatctggtggatgcgcatcttcatcctcggcgcacttaatatttcgctattctggagcttgttgtttatttcggtctaccgcctgccgggcggggtcgcggcgacggtaggcgctgtgcagccgctgatggtcgtgttcatctctgccgctctgctaggtagcccgatacgattgatggcggtcctgggggctatttgcggaactgcgggcgtggcgctgttggtgttgacaccaaacgcagcgctagatcctgtcggcgtcgcagcgggcctggcgggggcggtttccatggcgttcggaaccgtgctgacccgcaagtggcaacctcccgtgcctctgctcacctttaccgcctggcaactggcggccggaggacttctgctcgttccagtagctttagtgtttgatccgccaatcccgatgcctacaggaaccaatgttctcggcctggcgtggctcggcctgatcggagcgggtttaacctacttcctttggttccgggggatctcgcgactcgaacctacagttgtttccttactgggctttctcagcccccgagcgcttagtgggaatttgtaccccttatcgaaccgggagcacaggatgacgcctaacaattcattcaagccgacaccgcttcgcggcgcggcttaattcaggagttaaacatcatgagggaagcggtgatcgccgaagtatcgactcaactatcagaggtagttggcgtcatcgagcgccatctcgaaccgacgttgctggccgtacatttgtacggctccgcagtggatggcggcctgaagccacacagtgatattgatttgctggttacggtgaccgtaaggcttgatgaaacaacgcggcgagctttgatcaacgaccttttggaaacttcggcttcccctggagagagcgagattctccgcgctgtagaagtcaccattgttgtgcacgacgacatcattccgtggcgttatccagctaagcgcgaactgcaatttggagaatggcagcgcaatgacattcttgcaggtatcttcgagccagccacgatcgacattgatctggctatcttgctgacaaaagcaagagaacatagcgttgccttggtaggtccagcggcggaggaactctttgatccggttcctgaacaggatctatttgaggcgctaaatgaaaccttaacgctatggaactcgccgcccgactgggctggcgatgagcgaaatgtagtgcttacgttgtcccgcatttggtacagcgcagtaaccggcaaaatcgcgccgaaggatgtcgctgccgactgggcaatggagcgcctgccggcccagtatcagcccgtcatacttgaagctaggcaggcttatcttggacaagaagatcgcttggcctcgcgcgcagatcagttggaagaatttgttcactacgtgaaaggcgagatcaccaaggtagtcggcaaataatgtctaacaattcgttcaagccgacgccgcttcgcggcgcggcttaactcaagcgttagagagctggggaagactatgcgcgatctgttgaaggtggttctaagcctcgtcttgcgatggcatttcgatccattcccattccgcgctcaagatggcttcccctcggcagttcatcagggctaaatcaatctagccgacttgtccggtgaaatgggctgcactccaacagaaacaatcaaacaaacatacacagcgacttattcacacgagctca

SEQ ID NO: 41 - DNA, 34404 bp, Artificial sequence
  plasmid pDAB9167
aattacaacggtatatatcctgccagtcagcatcatcacaccaaaagttaggcccgaatagtttgaaattagaaagctcgcaattgaggtctacaggccaaattcgctcttagccgtacaatattactcaccggatcctaaccggtttaattaaggcgcgccatgcccgggcaagcggccgcacaagtttgtacaaaaaagcaggcttctagacctaggtggagtcatcacgcagactatctcagcatgtgcgtagcacgcggccgcgaattcggaaatgggccaagtgaaatggaaatagagcttcaatccatttagtcccactcaaaatggtgctcgaattatatttagttacgttcgaatcagacaaccaagtatttggttaataaaaaccactcgcaacaaaggaaaaacaccaagcgcgtgcgtccaacatccgacggaaggggggtaatgtggtccgaaaaccttacaaaaatctgacgtcatctacccccgaaaacgttgaatcgtcaacgggggtagttttcgaattatcttttttttaggggcagttttattaatttgctctagaaattttatgattttaattaaaaaaagaaaaagaatatttgtatatttattttttatactctttttttgtccaactatttctcttattttggcaactttaactagactagtaacttatgtcaatgtgtatggatgcatgagagtgagtatacacatgtctaaatgcatgccttatgaaagcaacgcaccacaaaacgaagacccctttacaaatacatctcatcccttagtaccctcttactactgtcccgacacaaactcaaaacaaggatccacaaccaaaaatggcagcgaggctgcaagagcagaaaggaggtgagatggacacgaggattgcgatcataggcatgagcgccatacttccttgtggaaccacggtgagagagtcatgggagaccataagggctggcattgattgcctgtctgatcttcctgaggatcgtgttgatgtgactgcgtactttgacccagtcaagaccacaaaggacaaaatctactgcaagagaggaggtttcattcctgagtatgactttgatgcgcgtgagtttggtctcaacatgttccagatggaagattctgatgcgaatcagaccatctcacttctcaaggtcaaagaagcacttcaagatgctgggattgatgcacttggaaaggagaagaaaaacataggatgcgtgcttggcattggaggtggacagaagagttcacatgagttctacagcagactcaactatgtggttgtggagaaagtcttgagaaagatggggatgccagaggaagatgtcaaagtggctgtggagaagtacaaagcgaacttcccagaatggagacttgactctttccctggattccttgggaatgtcactgctggcagatgcaccaacacattcaacttggatggcatgaactgcgttgtggatgctgcatgtgcaagctccttgatagcagtcaaggttgcgattgatgaactgctctatggtgactgcgacatgatggtcactggtgcaacctgcacagacaactccattgggatgtacatggctttctcaaagacacctgtgttcagcacggacccaagtgtgagagcgtatgatgagaaaacgaaagggatgctcattggtgagggatcagccatgttggtgctcaaacgttatgcagatgcagtgagggatggtgatgagattcatgctgtgattcgtggttgtgcaagctcaagtgatggcaaagcagctggcatctacactcccacaatcagtggtcaagaggaagccttgagacgtgcatacaatcgtgcctgcgttgaccctgccactgtcactttggttgagggtcatgggactggcactccagttggagataggattgagttgactgcgttgaggaacttgtttgacaaagcgtatggtgaagggaacacagagaaagttgcagttggaagtatcaagtccagtattggtcatttgaaggctgttgctggtcttgctggaatgatcaaggtcatcatggctctcaaacacaagactttgcctggaacgatcaatgtggacaatccacccaatctctatgacaacactcccatcaatgagtcatccctctacatcaacacgatgaacagaccctggttccctccacctggtgttccgagacgtgctggaatatccagctttggctttggaggtgccaactaccatgcagtgttggaagaggctgaaccagagcacacgacagcgtacagactcaacaaacgtccacaaccggtgttgatgatggctgcaactcctgctgcgttgcagagcctttgtgaagctcagctgaaagagtttgaagctgcgatcaaggagaatgagacagtcaagaatactgcctacatcaagtgtgtcaagtttggagaacagttcaagttccctgggagcatacctgcgaccaatgcgagactgggattcttggtcaaagatgcggaggatgcgtgctccacgcttcgtgctatatgtgctcagtttgccaaagatgtgaccaaagaagcgtggaggcttccgagagaaggagtttctttccgtgccaaaggcattgccaccaatggtgctgttgctgcactcttctctggacaaggtgctcagtacacacacatgttcagtgaagttgcgatgaactggcctcagttcagacagtccattgctgcaatggacgctgcacagtccaaggttgctggaagtgacaaagactttgaaagagtctctcaagtcctgtacccaaggaaaccgtacgaacgtgagccagaacaagatcacaagaaaatctcactcacagcatacagccagccgtcaaccctggcatgtgctcttggtgcctttgagattttcaaggaagctggattcactccagactttgcagctggacacagcttgggtgagtttgctgcgctctatgcagctggttgtgttgacagagatgagttgtttgaacttgtttgcagaagggcaaggatcatgggaggcaaagatgcacctgccacacccaaaggttgcatggcagctgtcataggacccaacgcagagaacatcaaggttcaagctgccaacgtctggcttggaaactcaaactctccgtctcagactgtcattactgggtctgttgaagggattcaagctgaaagtgccagattgcagaaggaagggttcagagttgtgcctcttgcttgtgagtctgccttccattctccacagatggaaaatgccagctcagctttcaaagatgtcatatccaaggtttccttccgtacacccaaagcagaaacaaagctcttcagcaatgtttctggagagacctatccgacggatgccagagagatgctcactcaacacatgacctcatctgtgaagttcctgacccaagtgaggaacatgcaccaagctggtgcgagaatctttgttgagtttggaccgaaacaagttctcagcaaacttgtttctgaaaccctcaaagatgacccgtctgttgtcacagtgtctgtgaacccagcttctggcacggactctgacatacagttgagggatgctgcagttcagctggttgtggctggtgtcaatcttcaagggtttgacaagtgggatgctcctgatgccacgaggatgcaagccatcaagaaaaagagaaccacactcagactttcagctgccacctatgtcagtgacaagaccaagaaagtgagggatgctgccatgaacgacggaagatgtgtcacatacctcaagggtgctgcaccactcatcaaggctcctgaacctgtggttgacgaagctgccaagagggaggctgaaaggcttcagaaggagcttcaagacgctcagaggcagcttgacgacgccaaacgtgcagctgcagaagccaactccaaacttgctgctgccaaggaggaagccaagactgctgcagcttcagccaagcctgcagttgacactgctgttgtggagaaacatcgtgccatcctcaagtccatgctggctgagctggatggttatggaagtgttgatgcttcttcccttcagcaacagcaacagcaacagactgctccggcgcctgttaaagccgctgcccctgccgctcccgttgcaagtgctcctgctcccgccgtgtccaacgagttgcttgagaaagctgagacagttgtgatggaggttctcgctgccaagactggatacgaaacagacatgattgaggcggacatggagcttgagactgagttgggaattgacagcatcaagagggttgaaattctttctgaagtccaagctatgcttaacgttgaggcgaaagatgttgatgctctctctaggacgagaacagtgggtgaagttgtcaacgctatgaaggcagaaatcgctggttcttccgctccggcgccggcagctgccgcacctgcaccggctaaagcggctccagctgcagctgcaccagctgtttctaatgagctgctcgaaaaggcagaaactgttgtgatggaagtccttgctgccaaaactggctacgaaactgacatgatagaatcagacatggagcttgagacggagcttggaattgattccatcaagcgtgtggaaatcctcagtgaagtccaagccatgctcaatgtggaagctaaggatgtggatgctctctcaaggaccagaactgtcggtgaggttgtcaatgccatgaaggctgagatagctggaggctccgctcctgcgccggccgctgccgctcctggtcccgctgccgcggctccagctccagctgcagccgctccggccgtctcaaacgaactccttgaaaaagctgagaccgtcgtgatggaggtcttggcagctaaaaccggctatgagactgacatgattgagtctgacatggaattggagacagaacttgggatagacagcatcaaacgtgttgaaatcctcagtgaggtccaagctatgctgaacgtggaagcgaaggatgttgatgctctgtccagaacgaggaccgttggtgaggttgtggatgccatgaaggctgaaattgctggagggtctgcgcccgcgccagctgcagccgctcctgcacccgcagccgcggcacctgctccagctgcacctgcacctgccgtttcttcagaactcttggagaaggctgagacggttgtgatggaggttttggctgcaaagactggctatgagaccgacatgattgaatctgatatggaattggagacagagcttgggatcgattccatcaaaagagtggagatcctgagtgaagtccaagccatgctcaatgttgaagctaaggatgttgatgcactttcaagaacaaggacagtgggtgaggttgtggatgccatgaaggcggagattgctggagggagcgcgcctgcgccagctgccgcggcacctgcaccggcagccgcagctccagctccagctgcaccagcaccggccgcgcccgcgccagctgtttcatccgaactcctggaaaaggccgagacggttgtgatggaggtgctcgcagctaagactggttacgagaccgacatgattgaaagtgacatggagcttgaaaccgagttgggaatagatagcatcaaacgtgttgaaatcttgtctgaggtccaagctatgttgaacgtggaggcaaaagatgtcgatgcgctttcaagaaccagaacagtcggtgaggtcgtggacgccatgaaggctgaaattgccggaagctctgctagtgcgccagctgcagccgcacctgcacctgctgccgcggcacctgctccagctgcagccgctcctgccgtcagcaatgagttgctggagaaagccgaaacagttgtgatggaagtccttgctgcaaaaactggttacgaaacggacatgattgagtcagacatggaattggagaccgaacttggaatagattccatcaagagagtggagatcctctctgaggtgcaagccatgctcaacgttgaggctaaagatgttgatgcactcagtaggacaagaactgtgggggaagttgtcgatgcgatgaaggctgagattgctggaggctctgctcctgcgccggcagctgccgcacctgcacccgcagccgcggcaccagctgtcagcaacgaattgcttgagaaggctgaaacagttgtcatggaagtgctggctgcaaaaaccggctatgagactgacatgattgagtctgacatggaacttgagacggaattgggcattgacagcatcaagcgtgttgagatcctcagtgaagtccaagcaatgctcaatgtggaggctaaggatgtggatgccctctcaaggaccagaacagttggtgaggtcgttgatgcgatgaaggcggagatcgctggaagttccgcgcctgcgccagctgcagccgctcctgcacccgcagccgcggcaccggctccagctgcagccgcaccggccgtctcctcagaactcctggaaaaggctgagacagttgtgatggaagtccttgctgcgaaaactggctatgagaccgacatgattgaatctgacatggaactggagaccgagcttggaattgactccatcaaacgtgttgaaatcctctctgaggttcaagcgatgttgaatgtggaggccaaagatgttgatgctctttccagaacaaggacggtgggagaggtggttgatgccatgaaggctgagatagctgggggttctgctcctgcgccagctgcagccgctcctgctcccgctgccgcggcaccagctgtcagcaacgaactccttgaaaaagctgaaactgttgtgatggaggttttggctgcaaagactggatacgagactgacatgatagagtcagacatggagttggaaacagagcttgggattgatagcatcaagcgtgtggaaatcctttctgaggttcaagccatgctgaacgttgaggccaaagatgtcgatgctttgtcaaggaccagaacggttggagaagtggtcgatgccatgaaggctgagatagctggtggatcagcccctgctccggctgcagccgctcctgcaagtgccggtgctgcaccagctgtgaagattgattcagttcatggtgctgactgtgacgatttgtcactgatgcacgcaaaggtggttgacatcagaaggccagatgaactgattctggaaagaccggagaaccgtccagttcttgtcgttgacgatggctcagagttgacacttgctcttgtgagggtgttgggagcctgtgcagttgtcttgacctttgagggattgcagttggctcagagagctggtgcagctgccattcgtcatgttctggctaaggacctttcagcagaatcagctgagaaggccatcaaagaggctgagcaaagatttggagcgttgggaggcttcataagccagcaagcagaaaggtttgaaccagctgagatactgggtttcacactcatgtgtgcgaagtttgccaaagcctctctctgcactgctgtggctggaggtcgtcctgccttcatcggtgtggctaggcttgacggcagacttggattcacctctcaaggcacttctgacgcactcaagagagcacagcgtggagcgatctttggactctgcaagacaatagggttggagtggtcagaatctgatgtgttcagccgtggtgtggacattgctcaagggatgcacccagaagatgctgcagttgccatagttagggagatggcgtgtgctgacatcagaatcagagaggttgggattggagcaaaccagcaaagatgcacaatcagagctgccaagttggagactgggaaccctcagagacagatagcgaaagacgatgtgcttctggtttctggaggtgctcgtgggatcacacctctttgcatccgtgagatcacgcgtcagattgctggaggcaagtacattctgttgggtcgtagcaaagtttctgcgtctgaaccagcatggtgtgctggcatcactgatgagaaggctgtgcagaaagctgccacccaagagttgaagagggccttcagtgctggtgaaggacccaaacccactccaagggctgtcacgaaacttgtgggatctgttcttggtgctcgtgaagtgagaagctccattgctgccattgaagctctgggtggcaaagcgatctacagctcttgtgatgtgaactctgctgcagatgttgccaaagcagttagggatgcagagtcccagcttggtgccagagttagtggaatcgttcacgcttctggtgtgctccgtgatcgtctcatagagaagaaactccctgacgagtttgatgctgtctttgggaccaaagtcactgggttggagaatcttctggctgcagttgatcgtgccaacctcaaacacatggttctcttcagctcccttgctggtttccacggcaatgttggtcagtctgactatgcgatggcaaacgaagctctcaacaagatgggtttggaacttgcgaaggatgtcagtgtcaagtccatctgctttggtccctgggatggtgggatggtgacacctcaactcaagaaacagtttcaagaaatgggagttcagatcattcctcgtgaaggaggtgctgatacagttgcgaggattgtgttgggatcaagtcctgctgagatccttgttggaaactggaggacaccatccaagaaagttggaagtgacacgatcaccctgcatagaaagatcagtgccaagtccaatcccttcttggaggatcatgtcatacaaggcagaagggtgttgccaatgacccttgctattgggagccttgctgagacctgccttggactcttccctggctactctctctgggccatagatgacgcacagctcttcaaaggtgtcactgttgatggagacgtcaactgtgaagtgaccctcacaccgtccactgctccgagtgggagggtgaatgtccaagcgacgctcaagacgttctcaagtggaaaacttgttccagcctacagagctgtcatagtgttgtccaaccaaggtgctccacctgccaatgcaaccatgcagcctccgagccttgatgcagatcctgctttgcaagggtcagtctatgatggcaagactctctttcatggtcctgcgttcagaggcattgatgacgttctcagctgcaccaagagccagcttgttgccaagtgttctgctgttcctggatcagatgcagccagaggagagtttgcaactgacactgatgcacatgatccctttgtcaatgatcttgcctttcaagcaatgttggtctgggtgaggagaacgctgggacaagctgcactcccgaactccattcagaggatagtccaacacagaccggtcccacaagacaaacccttctacatcaccctcagatccaatcagagtggtggacatagccagcacaaacatgcacttcagttccacaacgaacaaggtgatctcttcattgatgttcaagcctctgtcattgcgacagactcacttgcgttctgagtagttagcttaatcacttaggtcaccctatcaaaatctatttagaaatacacaatattttgttgcaggcttgctggagaatcgatctgctatcataaaaattacaaaaaaattttatttgcctcaattattttaggattggtattaaggacgcttaaattatttgtcgggtcactacgcatcattgtgattgagaagatcagcgatacgaaatattcgtagtactatcgataatttatttgaaaattcataagaaaagcaaacgttacatgaattgatgaaacaatacaaagacagataaagccacgcacatttaggatattggccgagattactgaatattgagtaagatcacggaatttctgacaggagcatgtcttcaattcagcccaaatggcagttgaaatactcaaaccgccccatatgcaggagcggatcattcattgtttgtttggttgcctttgccaacatgggagtccaaggttgcggccgcttaattaagatgagtgatactcaggactcaggactcactctgctgatcactagtgctagcctcgaggtcgacacaactttgtatacaaaagttgtctagacctaggctcagcaactcatccagtcaagttcgagtcagtgagttgggcggccgcagatctgattggtaagatatgggtactgtttggtttatatgttttgactattcagtcactatggcccccataaattttaattcggctggtatgtctcggttaagaccggtttgacatggttcatttcagttcaattatgttaatctggcacgtgatatgtttaccttcacacgaacattagtaatgatgggctaatttaagacttaacaggcctagagaggcccatcttattacgtaacggcgtcgtttagagtgcaccaagcttataaatgaaaacgagctacctcgggacatcacgctctttgtacactccgccatctctctctctcgttggagcagatctctctcgtgaatatcgacaatggctgcaaggaacgtgagtgcggctcatgagatgcatgacgagaagaggatagctgttgtgggcatggctgttcagtatgctggatgcaaaacgaaagacgagttctgggaagttctcatgaatggaaaagttgagagcaaagtgatcagcgacaaacgtcttggttcaaattaccgtgctgaacactacaaagctgaaaggagcaagtatgctgacaccttctgcaatgagacatatggaactcttgatgagaacgaaatagacaatgagcatgaactccttttgaaccttgccaaacaagccttggctgaaacatctgtcaaagattcaacaagatgtggcatagtttctggatgcctcagcttcccgatggacaacctccaaggtgaactcttgaatgtgtaccagaaccatgttgagaagaaacttggtgccagagttttcaaagatgcctctcactggtcagaaagagaacagtccaacaaaccagaggctggtgacagaagaatcttcatggaccctgcttcctttgttgctgaggaactcaatcttggcgctctccactactctgttgatgctgcctgtgccactgcgctctatgtgctcagactggcgcaagatcacttggtctctggtgcagctgatgtgatgctttgtggtgcaacatgcctgccggagccgtttttcatactctctgggttctcaaccttccaagccatgcctgttggaacgggtcagaatgtgtccatgccgctgcacaaagattctcaaggattgacccctggtgaaggaggttccatcatggtcctcaaacgtttggatgacgcaatcagagatggagatcacatctatggaacacttttgggagccaatgtcagcaacagtggcactggtctgccacttaaaccccttttgccgtcagagaaaaagtgcctcatggacacctacacacgtatcaatgtgcatccccacaagattcagtatgttgaatgccatgcaactgggactccacaaggtgatcgtgtggaaattgatgctgtgaaggcttgctttgaaggcaaagtcccacgttttggaaccacaaaagggaactttggacacacattggtggcagctgggtttgctggcatgtgcaaagtgcttctctccatgaagcacgggatcattccacccactccgggaatagatgacgaaacgaagatggaccctctggttgtctctggtgaggccattccctggccagaaacgaatggagaaccgaagcgtgctggtctctcagcgtttggatttggtgggaccaatgctcatgctgtctttgaggaacatgacccaagcaatgctgcatgcactggccatgactccatttctgctctctctgcacgttgtggtggtgagtcaaacatgagaatagcaatcactgggatggatgccacttttggtgctttgaaaggattggatgcttttgaaagggccatctacactggtgctcatggtgctataccactcccagaaaagagatggagattcctggggaaagacaaggacttccttgatctttgtggagtcaaagcaacaccgcatggctgttacattgaagatgttgaagttgatttccagaggctgaggactccaatgactcctgaagatatgctcttgcctcaacagcttctggctgtcaccacaattgatagggccatattggactctggcatgaagaaaggtggaaatgtggctgtctttgtggggttggggaccgatcttgaactctaccgtcaccgtgcaagggttgctctcaaggagagagtgaggcctgaagccagcaagaaactcaatgacatgatgcagtacatcaatgattgtgggacaagcacttcttacaccagctacataggcaacttggttgcaacaagggtcagttcacaatggggcttcacgggaccttccttcacaatcacagaaggcaacaattctgtgtacagatgtgctgaacttggcaaatacctcttggaaacgggagaggttgatggggttgtggttgcgggtgttgatctctgtgggagtgctgagaacctttacgtcaagtcaaggcgtttcaaggtgtctacatctgacaccccgagagccagctttgatgcagctgctgatggttactttgttggagagggctgtggtgcatttgtgctcaagcgtgagacaagctgcaccaaggatgacagaatctatgcttgcatggatgccatagttcctggaaatgttccatctgcatgtttgagagaggcattggatcaagccagagtcaagcctggagacatcgagatgttggagctttctgctgattcagcgaggcatttgaaggacccgtctgttctcccaaaggaactcactgctgaggaagagattggcggacttcagacgattcttcgtgacgatgacaagctcccaaggaatgttgcaactggaagtgtcaaggccactgttggtgacactggttatgcttctggtgctgccagtttgattaaggctgcgctttgcatctacaaccgttacctgcccagcaatggagatgactgggatgaacctgcacctgaagcaccctgggacagcacactctttgcgtgccagacctcaagagcttggttgaagaaccctggtgagagacgttatgcggctgtttccggagtcagtgaaaccagaagttgctacagtgtgctgctttctgaagcagagggacactacgagagagagaacagaatcagtttggatgaggaagcacccaagctcattgtgttgagagcagactcccatgaagagattcttggaagattggacaagataagggaaaggttcttgcagcccacgggtgctgcacccagagagtctgaattgaaggcgcaagcccgtaggatctttcttgaactccttggtgagacccttgcccaagatgcagcttcatctggaagtcagaagccccttgctctcagcttggtctccactccatccaagctccagagagaggtggaacttgcggcaaaaggcattccgagatgtctcaagatgagacgtgattggagttcccctgctggaagcagatatgcgcctgagcctttggccagtgacagagttgccttcatgtatggagaaggaaggagcccttactatggcatcacacaagacattcataggatttggcctgaacttcatgaggtcatcaatgagaaaacaaaccgtctctgggctgaaggtgacagatgggtcatgccaagggccagcttcaagagtgagcttgagtcacaacagcaagagtttgacagaaacatgattgaaatgttccgtcttggaatcctcacctcaattgccttcacaaacctggcgagagatgttctcaacatcacgcccaaagcagcctttggactcagtttgggagagatttccatgatctttgctttctccaagaaaaacggtttgataagcgatcagttgacaaaggatttgagagagtcagatgtctggaacaaagctctggctgttgagttcaatgcgctcagagaagcctggggcattccacagtctgtcccaaaagatgagttctggcaaggttacatagtgaggggaacgaaacaagacatagaagcagccatagcaccagactcaaagtatgtgaggttgaccatcatcaatgatgccaacactgctctcatcagtggaaagcctgatgcatgcaaagctgcgattgctcgtcttggtggcaacatccctgcgcttccagtcactcaaggcatgtgtgggcattgcccagaggtgggaccttacaccaaggacatcgcaaagatccacgccaaccttgagttccctgtggttgatggtcttgatctctggactaccataaaccagaagaggcttgtgccaagagccacgggtgccaaagatgaatgggctccttcatcctttggggagtatgctggacagctctatgagaaacaagccaacttccctcagatagttgaaaccatctacaagcagaactatgatgtgtttgttgaagttgggccaaacaatcacagaagcacagcagtgagaaccacgcttggaccacagagaaaccaccttgctggtgccatagacaagcagaacgaggatgcttggacgacaatagtcaagctcgtggcttcattgaaggctcaccttgttcctggagtgaccatcagtccgctctaccactccaagctcgttgcagaggctgaggcttgttatgctgcgctctgtaaaggtgagaaacccaagaaaaacaagtttgtgagaaagattcagttgaatggcagattcaacagcaaggcagaccccatctcctcagcagaccttgcatccttcccacctgcggaccctgcgattgaagctgccatctcttcaaggatcatgaagcctgtggctccgaaattctatgcgcgtctcaacattgatgagcaagatgagaccagagatccgatcttgaacaaggacaatgcgccttccagctccagctcttccagcagttcctcttccagcagttcatctccgtctcctgctccttcagctccagttcagaagaaagctgccccagctgcggagacaaaagctgttgccagtgctgatgcacttcgtagtgccctgcttgatcttgactccatgcttgcgctcagctctgcaagtgcttctggcaaccttgttgagactgcgccatctgatgccagtgtcattgtccctccgtgcaacattgctgatcttggcagcagagctttcatgaaaacttatggtgtttctgcgcctctgtacaccggtgcaatggccaagggaattgcctctgcggacttggtgatcgcagctggaaggcaaggaatccttgcgtcatttggtgctggaggccttccaatgcaagttgtgcgtgagtccattgaaaagattcaagctgccctgcccaatggaccatatgctgtcaacctcatccattctccttttgacagcaaccttgagaagggaaatgttgatctcttcttggaaaagggtgtcacttttgttgaggcttcagccttcatgacgttgacaccgcaagttgtcagatacagagcggctgggttgacgaggaatgcagatgggtcagtcaacataaggaacagaatcattgggaaagtctccagaactgagctggctgaaatgttcatgcgtcctgcacctgagcatcttttgcagaagctcattgcttctggggagatcaatcaagaacaagctgagttggccagacgtgttcctgtggctgatgacattgcggttgaagctgattctggtggacacactgacaaccgtccaatccatgtcattctgcctctgattatcaacctgagggataggcttcacagagagtgtggatacccagcaaacctgagggttcgtgttggtgctgggggtggcattgggtgtccccaagctgcgctggcaactttcaacatgggtgcctctttcattgtcactggaacagtgaaccaagttgccaaacaatctgggacgtgtgacaatgtgaggaaacagcttgcgaaagcaacttactcagatgtttgcatggcaccggcagctgacatgtttgaggaaggtgtgaaacttcaagttttgaagaaaggaacaatgttcccttcaagagccaacaaactctatgagttgttctgcaagtatgattcttttgagtccatgcctccagcagagcttgcgagggttgagaaaagaatcttcagtcgtgcattggaagaggtctgggatgagaccaagaacttctacatcaaccgtctccacaacccagagaagatacagagggctgagagggaccccaaactgaagatgtcactgtgtttcagatggtatctgtccctggcttcaaggtgggccaacactggagcttctgacagagtcatggactaccaagtttggtgtggtcctgccattggttcattcaatgatttcatcaaaggaacttaccttgatccggcagtggcaaatgagtacccgtgtgttgtgcagatcaacaaacagattcttagaggagcgtgcttcttgaggcgtcttgaaatactgagaaatgcaaggctttcagatggtgcagctgcacttgtggcgagcattgatgacacatatgtccctgctgagaagctgtgagtagttagcttaatcacttaggtcaccctatcaaaatctatttagaaatacacaatattttgttgcaggcttgctggagaatcgatctgctatcataaaaattacaaaaaaattttatttgcctcaattattttaggattggtattaaggacgcttaaattatttgtcgggtcactacgcatcattgtgattgagaagatcagcgatacgaaatattcgtagtactatcgataatttatttgaaaattcataagaaaagcaaacgttacatgaattgatgaaacaatacaaagacagataaagccacgcacatttaggatattggccgagattactgaatattgagtaagatcacggaatttctgacaggagcatgtcttcaattcagcccaaatggcagttgaaatactcaaaccgccccatatgcaggagcggatcattcattgtttgtttggttgcctttgccaacatgggagtccaaggttgcggccgcttaattaatctgacctgaccactagacctgagtgagtacagatgtgctactagtgctagcctcgaggtcgaccaacttttctatacaaagttgtctagacctaggactaggcactgagtgactcactgacctgactgagtgactggcggccgcgcggccgcgaattcggaaatgggccaagtgaaatggaaatagagcttcaatccatttagtcccactcaaaatggtgctcgaattatatttagttacgttcgaatcagacaaccaagtatttggttaataaaaaccactcgcaacaaaggaaaaacaccaagcgcgtgcgtccaacatccgacggaaggggggtaatgtggtccgaaaaccttacaaaaatctgacgtcatctacccccgaaaacgttgaatcgtcaacgggggtagttttcgaattatcttttttttaggggcagttttattaatttgctctagaaattttatgattttaattaaaaaaagaaaaagaatatttgtatatttattttttatactctttttttgtccaactatttctcttattttggcaactttaactagactagtaacttatgtcaatgtgtatggatgcatgagagtgagtatacacatgtctaaatgcatgccttatgaaagcaacgcaccacaaaacgaagacccctttacaaatacatctcatcccttagtaccctcttactactgtcccgacacaaactcaaaacaaggatccacaaccaaaaatggcgcttcgtgtcaagaccaacaagaagccatgttgggagatgaccaaggaggaactgacctctggcaaaactgaggtgttcaactatgaggaactcctggagtttgcagagggtgacatagctaaggtttttggtccggagtttgctgtcatagacaagtaccccagaagggtgaggctgcctgctcgtgaatacctgcttgtgacaagggtcacactcatggatgccgaggtcaacaactacagagttggtgccagaatggtcactgagtatgatcttccagtgaatggcgaattgtctgagggaggtgattgtccctgggcagttctggttgagagtggacagtgcgatttgatgctgatatcatacatgggaattgatttccagaaccaaggtgacagagtttaccgtctgctcaacaccacgttgacattctatggggttgcccatgagggagagacccttgagtatgacatcagagtgaccggttttgccaaacgtttggatggtggcatctccatgttcttctttgagtatgactgctatgtcaatgggaggcttctcattgagatgagagatggctgtgctggcttcttcacaaatgaggagcttgatgcgggaaagggtgtggtgttcacaagaggggatttggctgccagagctaagattccaaagcaagatgtttctccctatgctgtcgctccctgccttcacaaaacaaaactcaacgaaaaggagatgcagaccttggttgacaaagattgggcttccgtttttggctcaaagaatggcatgccggagatcaactacaaactctgcgcacgtaagatgctcatgattgatagagtcaccagcattgaccataagggaggtgtgtacggtttgggtcagttggttggtgagaaaatcttggagagggaccattggtacttcccatgccattttgttaaggatcaagtcatggctggatctcttgtcagcgacggttgttcacaaatgctcaagatgtacatgatctggctcggtttgcaccttaccaccggaccatttgacttcagacccgtcaacggacacccgaacaaagttaggtgtaggggtcagatatctcctcataagggaaagttggtctacgtcatggagatcaaagagatgggattcgacgaggataacgatccgtacgccattgctgacgtcaacatcattgacgttgatttcgaaaagggtcaagatttcagccttgatagaatcagcgactacggaaagggggatcttaacaaaaagatcgtcgtggacttcaagggcattgctctcaagatgcagaagagatccacgaacaagaacccctccaaagttcagcccgtttttgctaacggtgcagccactgtgggaccggaagcgtccaaggccagctctggtgccagtgctagtgcttctgctgcccctgcgaagcctgctttctcagcagatgttcttgcgccaaagccagttgcacttcctgaacatatcctcaagggtgacgctctcgctccgaaagaaatgtcctggcatcccatgtcaaaacttcctggcaacccgacgccgttcttctcccctagttcttaccctccgagggcaatttgcttcatccctttccctggcaacccacttgacaacaattgcaaagctggagaaatgcctctgaactggtacaacatgtcagagttcatgtgtggaaaagttagcaactgcttgggaccagagttcgcaagatttgataagtcaaatacgagcagaagccctgcttttgatttggctcttgtgactagagttgttgaagtcacaaacatggaacatggcaagttcctgaatgttgattgcaatcccagcaaaggcacaatggtgggggagtttgactgtcctcaagatgcgtggttctttgatggttcttgcaatgatgggcacatgccttattccatcatcatggaaatcggacttcagacatccggtgttctcaccagtgtgttgaaagcaccactgacgatggacaaagatgacattctctttaggaaccttgatgcaagtgctgaaatggtgaggccagatgtggatgtgagggggaaaaccataaggaatgtgaccaagtgcactggatatgcaatgttgggaaagatggggattcacagattcacgtttgagttgtctgttgatggcgtggttttctacaaaggaagcacttcctttggatggttcactccagaggtgtttgctcagcaagctggacttgacaatgggaaaaagacggagccttggtgcaaaactaacaacacgagtgtgagaagagttgaaatcgcatcagccaaaggcaaagaacagctgactgagaaacttccagatgcaactaatgctcaagttctcagaaggtcagaacagtgtgagtatttggattacctcaacattgctcctgattctgggctgcatgggaaaggatatgcgcatggacacaaagatgttaacccacaagactggttcttctcttgtcacttttggtttgatcctgtgatgcctggatctttgggaattgagtcaatgttccagctcattgaggcatttgcggtggaccagaacataccgggagaatacaatgtgagcaatccgacctttgcccatgcccctggaaaaacggcgtggaagtaccgtggtcaattgacaccaaagaaccgtgcgatggactgtgaggtgcacatagtttcaatcacagcctctcctgaaaatggaggctacgttgacatagtggcagatggagcactttgggttgatggtctccgtgtgtatgaagccaaagaactcagagttcgtgttgtcagtgcaaaacctcaagccattccggatgttcaacaacagccacccagcgcaaaagcggaccctgggaaaactggagttgcactcagtccgactcagttgagagatgtcctgcttgaagtggacaatccattgtatcttggtgttgaaaactccaatttggtgcagtttgaatccaaacctgcaacttcttcaaggattgtcagtatcaaaccatgctccataagtgatcttggtgacaagtccttcatggaaacgtacaatgtgtcagcacctctgtacactggagcaatggccaagggaattgcgtctgcggaccttgtcattgctgctgggaagaggaagatattgggttcttttggagcgggtgggcttccaatgcaccatgtgagggcagctttggagaagatacaagcggctctgcctcaaggaccatatgctgtgaacctcattcattcaccttttgacagcaacttggaaaaggggaatgttgatctcttcctcgaaaagggcgttactgtggtggaggcttctgcattcatgaccctcactccccaagttgttcgttaccgtgcagccggactctcaaggaacgctgatgggagtgtcaacatcagaaaccgtatcattggaaaagtgtccagaacagaactcgccgaaatgttcatcagaccggctccggaacacctccttgagaaactcatagcttctggtgagataacacaagaacaagccgaacttgcccgtcgtgttcctgtcgcagacgacatcgctgttgaagctgattctggtggtcacactgacaaccgtcccatccacgtcatcttgcctttgatcatcaaccttaggaacagactgcacagagagtgtggttatcctgcgcaccttagagtcagagttggagctggaggcggtgttggctgcccacaagctgctgcggctgccctcacaatgggagctgccttcatagtgactgggactgtcaatcaagttgctaaacagtccgggacatgtgacaacgtgagaaaacaactcagtcaagccacctacagtgacatttgcatggctccagcagctgatatgtttgaggaaggtgtgaaactccaagttctcaagaagggaacaatgttcccatcaagagctaacaaattgtacgaactcttttgcaagtacgactctttcgattcaatgcctcctgctgaacttgaaaggatcgagaagaggatcttcaagagggcacttcaagaggtctgggaagagaccaaggacttttacatcaatggtttgaagaatccagagaagatacagagagcggaacatgaccccaaactcaagatgtctttgtgtttcagatggtatcttggtcttgcatcacgttgggccaacatgggtgctcctgatcgtgtcatggactatcaagtctggtgtggtccagccattggagccttcaatgacttcatcaaaggaacatatcttgatcctgctgtctctaatgagtacccatgtgttgtccagatcaaccttcagattttgcgtggtgcatgttacctgaggcgtcttaatgctctgagaaatgatccgaggattgatcttgagactgaagatgctgcctttgtctatgagccaacgaatgcgctttgagtagttagcttaatcacttaggtcaccctatcaaaatctatttagaaatacacaatattttgttgcaggcttgctggagaatcgatctgctatcataaaaattacaaaaaaattttatttgcctcaattattttaggattggtattaaggacgcttaaattatttgtcgggtcactacgcatcattgtgattgagaagatcagcgatacgaaatattcgtagtactatcgataatttatttgaaaattcataagaaaagcaaacgttacatgaattgatgaaacaatacaaagacagataaagccacgcacatttaggatattggccgagattactgaatattgagtaagatcacggaatttctgacaggagcatgtcttcaattcagcccaaatggcagttgaaatactcaaaccgccccatatgcaggagcggatcattcattgtttgtttggttgcctttgccaacatgggagtccaaggttgcggccgcttaattaatcacgagtggatgactgtcacgactgactcatgactgactactagtgctagcctcgaggtcgacacaactttgtataataaagttgtctagacctaggagctgtgctgggtaactcacatgagtcactggtcacatcagcggccgcagatctgattggtaagatatgggtactgtttggtttatatgttttgactattcagtcactatggcccccataaattttaattcggctggtatgtctcggttaagaccggtttgacatggttcatttcagttcaattatgttaatctggcacgtgatatgtttaccttcacacgaacattagtaatgatgggctaatttaagacttaacaggcctagagaggcccatcttattacgtaacggcgtcgtttagagtgcaccaagcttataaatgaaaacgagctacctcgggacatcacgctctttgtacactccgccatctctctctctcgttggagcagatctctctcgtgaatatcgacaatgcttcagcacacttggcttccgaagcctcccaatctgaccctcttgtcagatgaggttcatctctggaggattcctcttgaccagcctgagtcacaacttcaagaccttgctgccaccctgagcagtgatgaattggcgagggcaaacagattctactttccagaacacagaaggcgtttcactgctgggagaggcatcctcagatccatcttgggtggatacttgggagtggaaccgggtcaagtcaagtttgattatgagtcccgtgggaaaccgatccttggtgacagatttgctgagagtggactcctgttcaacttgtctcacagccagaaccttgccttgtgtgctgtcaactacacgcgtcaaataggcattgatcttgaatatctgcgtccaacatctgacttggagtctcttgcaaagaggttctttctcccaagagaatatgaactcttgaggtcactccctgatgagcagaaacagaagattttctttcgttactggacttgcaaagaggcttatctcaaagcaacgggagatggaatagccaaacttgaagagatcgagatagcactcaccccaacagaacctgccaagctccaaacagctcctgcgtggtctctgttggagcttgtgccagatgacaattgtgttgcagctgtggctgttgcgggttttggttggcagcccaagttctggcattactgagtagttagcttaatcacttaggtcaccctatcaaaatctatttagaaatacacaatattttgttgcaggcttgctggagaatcgatctgctatcataaaaattacaaaaaaattttatttgcctcaattattttaggattggtattaaggacgcttaaattatttgtcgggtcactacgcatcattgtgattgagaagatcagcgatacgaaatattcgtagtactatcgataatttatttgaaaattcataagaaaagcaaacgttacatgaattgatgaaacaatacaaagacagataaagccacgcacatttaggatattggccgagattactgaatattgagtaagatcacggaatttctgacaggagcatgtcttcaattcagcccaaatggcagttgaaatactcaaaccgccccatatgcaggagcggatcattcattgtttgtttggttgcctttgccaacatgggagtccaaggttgcggccgcttaattaactactgtcactgaggccgtagacgagtacggactgatctaactagtgctagcctcgaggtcgacacccagctttcttgtacaaagtggttgcggccgcttaattaaatttaaattcaattaatgcaatcttgattttcaacaacgaaggtaatggcgtaaaagaaaaaatgtatgttattgtattgatctttcatgatgttgaagcgtgccataatatgatgatgtataattaaaatattaactgtcgcattttattgaaatggcactgttatttcaaccatatctttgattctgttacatgacacgactgcaagaagtaaataatagacgccgttgttaaagaattgctatcatatgtgcctaactagagggaatttgagcgtcagacctaatcaaatattacaaaatatctcactctgtcgccagcaatggtgtaatcagcgcagacaaatggcgtaaagatcgcggaaaaacctccccgagtggcatgatagctgcctctgtattgctgatttagtcagccttatttgacttaagggtgccctcgttagtgacaaattgctttcaaggagacagccatgccccacactttgttgaaaaacaaattgcctttggggagacggtaaagccagttgctcttcaataaggaatgtcgaggaggcaatgtaaccgcctctggtagtacacttctctaatccaaaaatcaatttgtattcaagataccgcaaaaaacttatggtttaaaccctgcaggactagtccagaaggtaattatccaagatgtagcatcaagaatccaatgtttacgggaaaaactatggaagtattatgtaagctcagcaagaagcagatcaatatgcggcacatatgcaacctatgttcaaaaatgaagaatgtacagatacaagatcctatactgccagaatacgaagaagaatacgtagaaattgaaaaagaagaaccaggcgaagaaaagaatcttgaagacgtaagcactgacgacaacaatgaaaagaagaagataaggtcggtgattgtgaaagagacatagaggacacatgtaaggtggaaaatgtaagggcggaaagtaaccttatcacaaaggaatcttatcccccactacttatccttttatatttttccgtgtcatttttgcccttgagttttcctatataaggaaccaagttcggcatttgtgaaaacaagaaaaaatttggtgtaagctattttctttgaagtactgaggatacaacttcagagaaatttgtaagtttgtaggtaccagatctggatcccaaaccatgtctccggagaggagaccagttgagattaggccagctacagcagctgatatggccgcggtttgtgatatcgttaaccattacattgagacgtctacagtgaactttaggacagagccacaaacaccacaagagtggattgatgatctagagaggttgcaagatagatacccttggttggttgctgaggttgagggtgttgtggctggtattgcttacgctgggccctggaaggctaggaacgcttacgattggacagttgagagtactgtttacgtgtcacataggcatcaaaggttgggcctaggatctacattgtacacacatttgcttaagtctatggaggcgcaaggttttaagtctgtggttgctgttataggccttccaaacgatccatctgttaggttgcatgaggctttgggatacacagcccggggtacattgcgcgcagctggatacaagcatggtggatggcatgatgttggtttttggcaaagggattttgagttgccagctcctccaaggccagttaggccagttacccaaatctgagtagttagcttaatcacctagagctcgatcggcggcaatagcttcttagcgccatcccgggttgatcctatctgtgttgaaatagttgcggtgggcaaggctctctttcagaaagacaggcggccaaaggaacccaaggtgaggtgggctatggctctcagttccttgtggaagcgcttggtctaaggtgcagaggtgttagcgggatgaagcaaaagtgtccgattgtaacaagatatgttgatcctacgtaaggatattaaagtatgtattcatcactaatataatcagtgtattccaatatgtactacgatttccaatgtctttattgtcgccgtatgtaatcggcgtcacaaaataatccccggtgactttcttttaatccaggatgaaataatatgttattataatttttgcgatttggtccgttataggaattgaagtgtgcttgaggtcggtcgccaccactcccatttcataattttacatgtatttgaaaaataaaaatttatggtattcaatttaaacacgtatacttgtaaagaatgatatcttgaaagaaatatagtttaaatatttattgataaaataacaagtcaggtattatagtccaagcaaaaacataaatttattgatgcaagtttaaattcagaaatatttcaataactgattatatcagctggtacattgccgtagatgaaagactgagtgcgatattatggtgtaatacataggaattcgtttaaacgatctgcgtctaattttcggtccaacttgcacaggaaagacgtcgaccgcggtagctcttgcccagcagactgggcttccagtcctttcgctcgatcgggtccaatgttgtcctcagctgtgaaccggaagcggacgaccaacagtggaagaactgaaaggaacgagccgtctataccttgatgatcggcctctggtgaagggtatcatcgcagccaagcaagctcatgaaaggctgatgggggaggtgtataattatgaggcccacggcgggcttattctttagggaggatctatctcgttgctcaagtgcatggcgcaaagcagttattggagtgcggattttcgttggcatattattcgccacgagttagcagacgaagagaccttcatgaacgtggccaaggccagagttaagcagatgttacgccctgctgcaggcctttctattatccaatagttggttgatctttggaaagagcctcggctgaggcccatactgaaagagatcgatggatatcgatatgccatgttgtttgctagccagaaccagatcacatccgatatgctattgcagcttgacgcagatatggaggataagttgattcatgggatcgctcaggagtagctcatccatgcacgccgacaagaacagaaattccgtcgagttaacgcagccgcttacgacggattcgaaggtcatccattcggaatgtattagtttgcaccagctccgcgtcacacctgtcttcatttgaataagatgttagcaattgtttttagctttgtcttgttgtggcagggcggcaagtgcttcagacatcattctgttttcaaattttatgctggagaacagcttcttaattcctttggaaataatagactgcgtcttaaaattcagatgtctggatatagatatgattgtaaaataacctatttaagtgtcatttagaacataagttttatgaatgttcttccattttcgtcatcgaacgaataagagtaaatacaccttttttaacattacaaataagttcttatacgttgtttatacaccgggaatcatttccattattttcgcgcaaaagtcacggatattcgtgaaagcgacataaactgcgaaatttgcggggagtgtcttgagtttgcctcgaggctagcgcatgcacatagacacacacatcatctcattgatgcttggtaataattgtcattagattgtttttatgcatagatgcactcgaaatcagccaattttagacaagtatcaaacggatgtgacttcagtacattaaaaacgtccgcaatgtgttattaagttgtctaagcgtcaatttgatttacaattgaatatatcctgccccagccagccaacagctcgatttacaattgaatatatcctgccggccggcccacgcgtgtcgaggaattctgatctggcccccatttggacgtgaatgtagacacgtcgaaataaagatttccgaattagaataatttgtttattgctttcgcctataaatacgacggatcgtaatttgtcgttttatcaaaatgtactttcattttataataacgctgcggacatctacatttttgaattgaaaaaaaattggtaattactctttctttttctccatattgaccatcatactcattgctgatccatgtagatttcccggacatgaagccatttacaattgaatatatcctgccgccgctgccgctttgcacccggtggagcttgcatgttggtttctacgcagaactgagccggttaggcagataatttccattgagaactgagccatgtgcaccttccccccaacacggtgagcgacggggcaacggagtgatccacatgggacttttaaacatcatccgtcggatggcgttgcgagagaagcagtcgatccgtgagatcagccgacgcaccgggcaggcgcgcaacacgatcgcaaagtatttgaacgcaggtacaatcgagccgacgttcacgcggaacgaccaagcaagcttggctgccatttttggggtgaggccgttcgcggccgaggggcgcagcccctggggggatgggaggcccgcgttagcgggccgggagggttcgagaagggggggcaccccccttcggcgtgcgcggtcacgcgcacagggcgcagccctggttaaaaacaaggtttataaatattggtttaaaagcaggttaaaagacaggttagcggtggccgaaaaacgggcggaaacccttgcaaatgctggattttctgcctgtggacagcccctcaaatgtcaataggtgcgcccctcatctgtcagcactctgcccctcaagtgtcaaggatcgcgcccctcatctgtcagtagtcgcgcccctcaagtgtcaataccgcagggcacttatccccaggcttgtccacatcatctgtgggaaactcgcgtaaaatcaggcgttttcgccgatttgcgaggctggccagctccacgtcgccggccgaaatcgagcctgcccctcatctgtcaacgccgcgccgggtgagtcggcccctcaagtgtcaacgtccgcccctcatctgtcagtgagggccaagttttccgcgaggtatccacaacgccggcggccgcggtgtctcgcacacggcttcgacggcgtttctggcgcgtttgcagggccatagacggccgccagcccagcggcgagggcaaccagcccggtgagcgtcggaaagggtcgacggatcttttccgctgcataaccctgcttcggggtcattatagcgattttttcggtatatccatcctttttcgcacgatatacaggattttgccaaagggttcgtgtagactttccttggtgtatccaacggcgtcagccgggcaggataggtgaagtaggcccacccgcgagcgggtgttccttcttcactgtcccttattcgcacctggcggtgctcaacgggaatcctgctctgcgaggctggccggctaccgccggcgtaacagatgagggcaagcggatggctgatgaaaccaagccaaccaggaagggcagcccacctatcaaggtgtactgccttccagacgaacgaagagcgattgaggaaaaggcggcggcggccggcatgagcctgtcggcctacctgctggccgtcggccagggctacaaaatcacgggcgtcgtggactatgagcacgtccgcgagctggcccgcatcaatggcgacctgggccgcctgggcggcctgctgaaactctggctcaccgacgacccgcgcacggcgcggttcggtgatgccacgatcctcgccctgctggcgaagatcgaagagaagcaggacgagcttggcaaggtcatgatgggcgtggtccgcccgagggcagagccatgacttttttagccgctaaaacggccggggggtgcgcgtgattgccaagcacgtccccatgcgctccatcaagaagagcgacttcgcggagctggtattcgtgcagggcaagattcggaataccaagtacgagaaggacggccagacggtctacgggaccgacttcattgccgataaggtggattatctggacaccaaggcaccaggcgggtcaaatcaggaataagggcacattgccccggcgtgagtcggggcaatcccgcaaggagggtgaatgaatcggacgtttgaccggaaggcatacaggcaagaactgatcgacgcggggttttccgccgaggatgccgaaaccatcgcaagccgcaccgtcatgcgtgcgccccgcgaaaccttccagtccgtcggctcgatggtccagcaagctacggccaagatcgagcgcgacagcgtgcaactggctccccctgccctgcccgcgccatcggccgccgtggagcgttcgcgtcgtctcgaacaggaggcggcaggtttggcgaagtcgatgaccatcgacacgcgaggaactatgacgaccaagaagcgaaaaaccgccggcgaggacctggcaaaacaggtcagcgaggccaagcaggccgcgttgctgaaacacacgaagcagcagatcaaggaaatgcagctttccttgttcgatattgcgccgtggccggacacgatgcgagcgatgccaaacgacacggcccgctctgccctgttcaccacgcgcaacaagaaaatcccgcgcgaggcgctgcaaaacaaggtcattttccacgtcaacaaggacgtgaagatcacctacaccggcgtcgagctgcgggccgacgatgacgaactggtgtggcagcaggtgttggagtacgcgaagcgcacccctatcggcgagccgatcaccttcacgttctacgagctttgccaggacctgggctggtcgatcaatggccggtattacacgaaggccgaggaatgcctgtcgcgcctacaggcgacggcgatgggcttcacgtccgaccgcgttgggcacctggaatcggtgtcgctgctgcaccgcttccgcgtcctggaccgtggcaagaaaacgtcccgttgccaggtcctgatcgacgaggaaatcgtcgtgctgtttgctggcgaccactacacgaaattcatatgggagaagtaccgcaagctgtcgccgacggcccgacggatgttcgactatttcagctcgcaccgggagccgtacccgctcaagctggaaaccttccgcctcatgtgcggatcggattccacccgcgtgaagaagtggcgcgagcaggtcggcgaagcctgcgaagagttgcgaggcagcggcctggtggaacacgcctgggtcaatgatgacctggtgcattgcaaacgctagggccttgtggggtcagttccggctgggggttcagcagccagcgctttactggcatttcaggaacaagcgggcactgctcgacgcacttgcttcgctcagtatcgctcgggacgcacggcgcgctctacgaactgccgataaacagaggattaaaattgacaattgtgattaaggctcagattcgacggcttggagcggccgacgtgcaggatttccgcgagatccgattgtcggccctgaagaaagctccagagatgttcgggtccgtttacgagcacgaggagaaaaagcccatggaggcgttcgctgaacggttgcgagatgccgtggcattcggcgcctacatcgacggcgagatcattgggctgtcggtcttcaaacaggaggacggccccaaggacgctcacaaggcgcatctgtccggcgttttcgtggagcccgaacagcgaggccgaggggtcgccggtatgctgctgcgggcgttgccggcgggtttattgctcgtgatgatcgtccgacagattccaacgggaatctggtggatgcgcatcttcatcctcggcgcacttaatatttcgctattctggagcttgttgtttatttcggtctaccgcctgccgggcggggtcgcggcgacggtaggcgctgtgcagccgctgatggtcgtgttcatctctgccgctctgctaggtagcccgatacgattgatggcggtcctgggggctatttgcggaactgcgggcgtggcgctgttggtgttgacaccaaacgcagcgctagatcctgtcggcgtcgcagcgggcctggcgggggcggtttccatggcgttcggaaccgtgctgacccgcaagtggcaacctcccgtgcctctgctcacctttaccgcctggcaactggcggccggaggacttctgctcgttccagtagctttagtgtttgatccgccaatcccgatgcctacaggaaccaatgttctcggcctggcgtggctcggcctgatcggagcgggtttaacctacttcctttggttccgggggatctcgcgactcgaacctacagttgtttccttactgggctttctcagcccccgagcgcttagtgggaatttgtaccccttatcgaaccgggagcacaggatgacgcctaacaattcattcaagccgacaccgcttcgcggcgcggcttaattcaggagttaaacatcatgagggaagcggtgatcgccgaagtatcgactcaactatcagaggtagttggcgtcatcgagcgccatctcgaaccgacgttgctggccgtacatttgtacggctccgcagtggatggcggcctgaagccacacagtgatattgatttgctggttacggtgaccgtaaggcttgatgaaacaacgcggcgagctttgatcaacgaccttttggaaacttcggcttcccctggagagagcgagattctccgcgctgtagaagtcaccattgttgtgcacgacgacatcattccgtggcgttatccagctaagcgcgaactgcaatttggagaatggcagcgcaatgacattcttgcaggtatcttcgagccagccacgatcgacattgatctggctatcttgctgacaaaagcaagagaacatagcgttgccttggtaggtccagcggcggaggaactctttgatccggttcctgaacaggatctatttgaggcgctaaatgaaaccttaacgctatggaactcgccgcccgactgggctggcgatgagcgaaatgtagtgcttacgttgtcccgcatttggtacagcgcagtaaccggcaaaatcgcgccgaaggatgtcgctgccgactgggcaatggagcgcctgccggcccagtatcagcccgtcatacttgaagctaggcaggcttatcttggacaagaagatcgcttggcctcgcgcgcagatcagttggaagaatttgttcactacgtgaaaggcgagatcaccaaggtagtcggcaaataatgtctaacaattcgttcaagccgacgccgcttcgcggcgcggcttaactcaagcgttagagagctggggaagactatgcgcgatctgttgaaggtggttctaagcctcgtcttgcgatggcatttcgatccattcccattccgcgctcaagatggcttcccctcggcagttcatcagggctaaatcaatctagccgacttgtccggtgaaatgggctgcactccaacagaaacaatcaaacaaacatacacagcgacttattcacacgagctca

SEQ ID NO: 42 - DNA, 38762 bp, Artificial sequence
  plasmid pDAB7379
cttgtacaaagtggttgcggccgcttaattaaatttaaattcaattaatgcaatcttgattttcaacaacgaaggtaatggcgtaaaagaaaaaatgtatgttattgtattgatctttcatgatgttgaagcgtgccataatatgatgatgtataattaaaatattaactgtcgcattttattgaaatggcactgttatttcaaccatatctttgattctgttacatgacacgactgcaagaagtaaataatagacgccgttgttaaagaattgctatcatatgtgcctaactagagggaatttgagcgtcagacctaatcaaatattacaaaatatctcactctgtcgccagcaatggtgtaatcagcgcagacaaatggcgtaaagatcgcggaaaaacctccccgagtggcatgatagctgcctctgtattgctgatttagtcagccttatttgacttaagggtgccctcgttagtgacaaattgctttcaaggagacagccatgccccacactttgttgaaaaacaaattgcctttggggagacggtaaagccagttgctcttcaataaggaatgtcgaggaggcaatgtaaccgcctctggtagtacacttctctaatccaaaaatcaatttgtattcaagataccgcaaaaaacttatggtttaaaccctgcaggactagtccagaaggtaattatccaagatgtagcatcaagaatccaatgtttacgggaaaaactatggaagtattatgtaagctcagcaagaagcagatcaatatgcggcacatatgcaacctatgttcaaaaatgaagaatgtacagatacaagatcctatactgccagaatacgaagaagaatacgtagaaattgaaaaagaagaaccaggcgaagaaaagaatcttgaagacgtaagcactgacgacaacaatgaaaagaagaagataaggtcggtgattgtgaaagagacatagaggacacatgtaaggtggaaaatgtaagggcggaaagtaaccttatcacaaaggaatcttatcccccactacttatccttttatatttttccgtgtcatttttgcccttgagttttcctatataaggaaccaagttcggcatttgtgaaaacaagaaaaaatttggtgtaagctattttctttgaagtactgaggatacaacttcagagaaatttgtaagtttgtaggtaccagatctggatcccaaaccatgtctccggagaggagaccagttgagattaggccagctacagcagctgatatggccgcggtttgtgatatcgttaaccattacattgagacgtctacagtgaactttaggacagagccacaaacaccacaagagtggattgatgatctagagaggttgcaagatagatacccttggttggttgctgaggttgagggtgttgtggctggtattgcttacgctgggccctggaaggctaggaacgcttacgattggacagttgagagtactgtttacgtgtcacataggcatcaaaggttgggcctaggatctacattgtacacacatttgcttaagtctatggaggcgcaaggttttaagtctgtggttgctgttataggccttccaaacgatccatctgttaggttgcatgaggctttgggatacacagcccggggtacattgcgcgcagctggatacaagcatggtggatggcatgatgttggtttttggcaaagggattttgagttgccagctcctccaaggccagttaggccagttacccaaatctgagtagttagcttaatcacctagagctcgatcggcggcaatagcttcttagcgccatcccgggttgatcctatctgtgttgaaatagttgcggtgggcaaggctctctttcagaaagacaggcggccaaaggaacccaaggtgaggtgggctatggctctcagttccttgtggaagcgcttggtctaaggtgcagaggtgttagcgggatgaagcaaaagtgtccgattgtaacaagatatgttgatcctacgtaaggatattaaagtatgtattcatcactaatataatcagtgtattccaatatgtactacgatttccaatgtctttattgtcgccgtatgtaatcggcgtcacaaaataatccccggtgactttcttttaatccaggatgaaataatatgttattataatttttgcgatttggtccgttataggaattgaagtgtgcttgaggtcggtcgccaccactcccatttcataattttacatgtatttgaaaaataaaaatttatggtattcaatttaaacacgtatacttgtaaagaatgatatcttgaaagaaatatagtttaaatatttattgataaaataacaagtcaggtattatagtccaagcaaaaacataaatttattgatgcaagtttaaattcagaaatatttcaataactgattatatcagctggtacattgccgtagatgaaagactgagtgcgatattatggtgtaatacataggaattcgtttaaacgatctgcgtctaattttcggtccaacttgcacaggaaagacgtcgaccgcggtagctcttgcccagcagactgggcttccagtcctttcgctcgatcgggtccaatgttgtcctcagctgtgaaccggaagcggacgaccaacagtggaagaactgaaaggaacgagccgtctataccttgatgatcggcctctggtgaagggtatcatcgcagccaagcaagctcatgaaaggctgatgggggaggtgtataattatgaggcccacggcgggcttattctttagggaggatctatctcgttgctcaagtgcatggcgcaaagcagttattggagtgcggattttcgttggcatattattcgccacgagttagcagacgaagagaccttcatgaacgtggccaaggccagagttaagcagatgttacgccctgctgcaggcctttctattatccaatagttggttgatctttggaaagagcctcggctgaggcccatactgaaagagatcgatggatatcgatatgccatgttgtttgctagccagaaccagatcacatccgatatgctattgcagcttgacgcagatatggaggataagttgattcatgggatcgctcaggagtagctcatccatgcacgccgacaagaacagaaattccgtcgagttaacgcagccgcttacgacggattcgaaggtcatccattcggaatgtattagtttgcaccagctccgcgtcacacctgtcttcatttgaataagatgttagcaattgtttttagctttgtcttgttgtggcagggcggcaagtgcttcagacatcattctgttttcaaattttatgctggagaacagcttcttaattcctttggaaataatagactgcgtcttaaaattcagatgtctggatatagatatgattgtaaaataacctatttaagtgtcatttagaacataagttttatgaatgttcttccattttcgtcatcgaacgaataagagtaaatacaccttttttaacattacaaataagttcttatacgttgtttatacaccgggaatcatttccattattttcgcgcaaaagtcacggatattcgtgaaagcgacataaactgcgaaatttgcggggagtgtcttgagtttgcctcgaggctagcgcatgcacatagacacacacatcatctcattgatgcttggtaataattgtcattagattgtttttatgcatagatgcactcgaaatcagccaattttagacaagtatcaaacggatgtgacttcagtacattaaaaacgtccgcaatgtgttattaagttgtctaagcgtcaatttgatttacaattgaatatatcctgccccagccagccaacagctcgatttacaattgaatatatcctgccggccggcccacgcgtgtcgaggaattctgatctggcccccatttggacgtgaatgtagacacgtcgaaataaagatttccgaattagaataatttgtttattgctttcgcctataaatacgacggatcgtaatttgtcgttttatcaaaatgtactttcattttataataacgctgcggacatctacatttttgaattgaaaaaaaattggtaattactctttctttttctccatattgaccatcatactcattgctgatccatgtagatttcccggacatgaagccatttacaattgaatatatcctgccgccgctgccgctttgcacccggtggagcttgcatgttggtttctacgcagaactgagccggttaggcagataatttccattgagaactgagccatgtgcaccttccccccaacacggtgagcgacggggcaacggagtgatccacatgggacttttaaacatcatccgtcggatggcgttgcgagagaagcagtcgatccgtgagatcagccgacgcaccgggcaggcgcgcaacacgatcgcaaagtatttgaacgcaggtacaatcgagccgacgttcacgcggaacgaccaagcaagcttggctgccatttttggggtgaggccgttcgcggccgaggggcgcagcccctggggggatgggaggcccgcgttagcgggccgggagggttcgagaagggggggcaccccccttcggcgtgcgcggtcacgcgcacagggcgcagccctggttaaaaacaaggtttataaatattggtttaaaagcaggttaaaagacaggttagcggtggccgaaaaacgggcggaaacccttgcaaatgctggattttctgcctgtggacagcccctcaaatgtcaataggtgcgcccctcatctgtcagcactctgcccctcaagtgtcaaggatcgcgcccctcatctgtcagtagtcgcgcccctcaagtgtcaataccgcagggcacttatccccaggcttgtccacatcatctgtgggaaactcgcgtaaaatcaggcgttttcgccgatttgcgaggctggccagctccacgtcgccggccgaaatcgagcctgcccctcatctgtcaacgccgcgccgggtgagtcggcccctcaagtgtcaacgtccgcccctcatctgtcagtgagggccaagttttccgcgaggtatccacaacgccggcggccgcggtgtctcgcacacggcttcgacggcgtttctggcgcgtttgcagggccatagacggccgccagcccagcggcgagggcaaccagcccggtgagcgtcggaaagggtcgacggatcttttccgctgcataaccctgcttcggggtcattatagcgattttttcggtatatccatcctttttcgcacgatatacaggattttgccaaagggttcgtgtagactttccttggtgtatccaacggcgtcagccgggcaggataggtgaagtaggcccacccgcgagcgggtgttccttcttcactgtcccttattcgcacctggcggtgctcaacgggaatcctgctctgcgaggctggccggctaccgccggcgtaacagatgagggcaagcggatggctgatgaaaccaagccaaccaggaagggcagcccacctatcaaggtgtactgccttccagacgaacgaagagcgattgaggaaaaggcggcggcggccggcatgagcctgtcggcctacctgctggccgtcggccagggctacaaaatcacgggcgtcgtggactatgagcacgtccgcgagctggcccgcatcaatggcgacctgggccgcctgggcggcctgctgaaactctggctcaccgacgacccgcgcacggcgcggttcggtgatgccacgatcctcgccctgctggcgaagatcgaagagaagcaggacgagcttggcaaggtcatgatgggcgtggtccgcccgagggcagagccatgacttttttagccgctaaaacggccggggggtgcgcgtgattgccaagcacgtccccatgcgctccatcaagaagagcgacttcgcggagctggtattcgtgcagggcaagattcggaataccaagtacgagaaggacggccagacggtctacgggaccgacttcattgccgataaggtggattatctggacaccaaggcaccaggcgggtcaaatcaggaataagggcacattgccccggcgtgagtcggggcaatcccgcaaggagggtgaatgaatcggacgtttgaccggaaggcatacaggcaagaactgatcgacgcggggttttccgccgaggatgccgaaaccatcgcaagccgcaccgtcatgcgtgcgccccgcgaaaccttccagtccgtcggctcgatggtccagcaagctacggccaagatcgagcgcgacagcgtgcaactggctccccctgccctgcccgcgccatcggccgccgtggagcgttcgcgtcgtctcgaacaggaggcggcaggtttggcgaagtcgatgaccatcgacacgcgaggaactatgacgaccaagaagcgaaaaaccgccggcgaggacctggcaaaacaggtcagcgaggccaagcaggccgcgttgctgaaacacacgaagcagcagatcaaggaaatgcagctttccttgttcgatattgcgccgtggccggacacgatgcgagcgatgccaaacgacacggcccgctctgccctgttcaccacgcgcaacaagaaaatcccgcgcgaggcgctgcaaaacaaggtcattttccacgtcaacaaggacgtgaagatcacctacaccggcgtcgagctgcgggccgacgatgacgaactggtgtggcagcaggtgttggagtacgcgaagcgcacccctatcggcgagccgatcaccttcacgttctacgagctttgccaggacctgggctggtcgatcaatggccggtattacacgaaggccgaggaatgcctgtcgcgcctacaggcgacggcgatgggcttcacgtccgaccgcgttgggcacctggaatcggtgtcgctgctgcaccgcttccgcgtcctggaccgtggcaagaaaacgtcccgttgccaggtcctgatcgacgaggaaatcgtcgtgctgtttgctggcgaccactacacgaaattcatatgggagaagtaccgcaagctgtcgccgacggcccgacggatgttcgactatttcagctcgcaccgggagccgtacccgctcaagctggaaaccttccgcctcatgtgcggatcggattccacccgcgtgaagaagtggcgcgagcaggtcggcgaagcctgcgaagagttgcgaggcagcggcctggtggaacacgcctgggtcaatgatgacctggtgcattgcaaacgctagggccttgtggggtcagttccggctgggggttcagcagccagcgctttactggcatttcaggaacaagcgggcactgctcgacgcacttgcttcgctcagtatcgctcgggacgcacggcgcgctctacgaactgccgataaacagaggattaaaattgacaattgtgattaaggctcagattcgacggcttggagcggccgacgtgcaggatttccgcgagatccgattgtcggccctgaagaaagctccagagatgttcgggtccgtttacgagcacgaggagaaaaagcccatggaggcgttcgctgaacggttgcgagatgccgtggcattcggcgcctacatcgacggcgagatcattgggctgtcggtcttcaaacaggaggacggccccaaggacgctcacaaggcgcatctgtccggcgttttcgtggagcccgaacagcgaggccgaggggtcgccggtatgctgctgcgggcgttgccggcgggtttattgctcgtgatgatcgtccgacagattccaacgggaatctggtggatgcgcatcttcatcctcggcgcacttaatatttcgctattctggagcttgttgtttatttcggtctaccgcctgccgggcggggtcgcggcgacggtaggcgctgtgcagccgctgatggtcgtgttcatctctgccgctctgctaggtagcccgatacgattgatggcggtcctgggggctatttgcggaactgcgggcgtggcgctgttggtgttgacaccaaacgcagcgctagatcctgtcggcgtcgcagcgggcctggcgggggcggtttccatggcgttcggaaccgtgctgacccgcaagtggcaacctcccgtgcctctgctcacctttaccgcctggcaactggcggccggaggacttctgctcgttccagtagctttagtgtttgatccgccaatcccgatgcctacaggaaccaatgttctcggcctggcgtggctcggcctgatcggagcgggtttaacctacttcctttggttccgggggatctcgcgactcgaacctacagttgtttccttactgggctttctcagcccccgagcgcttagtgggaatttgtaccccttatcgaaccgggagcacaggatgacgcctaacaattcattcaagccgacaccgcttcgcggcgcggcttaattcaggagttaaacatcatgagggaagcggtgatcgccgaagtatcgactcaactatcagaggtagttggcgtcatcgagcgccatctcgaaccgacgttgctggccgtacatttgtacggctccgcagtggatggcggcctgaagccacacagtgatattgatttgctggttacggtgaccgtaaggcttgatgaaacaacgcggcgagctttgatcaacgaccttttggaaacttcggcttcccctggagagagcgagattctccgcgctgtagaagtcaccattgttgtgcacgacgacatcattccgtggcgttatccagctaagcgcgaactgcaatttggagaatggcagcgcaatgacattcttgcaggtatcttcgagccagccacgatcgacattgatctggctatcttgctgacaaaagcaagagaacatagcgttgccttggtaggtccagcggcggaggaactctttgatccggttcctgaacaggatctatttgaggcgctaaatgaaaccttaacgctatggaactcgccgcccgactgggctggcgatgagcgaaatgtagtgcttacgttgtcccgcatttggtacagcgcagtaaccggcaaaatcgcgccgaaggatgtcgctgccgactgggcaatggagcgcctgccggcccagtatcagcccgtcatacttgaagctaggcaggcttatcttggacaagaagatcgcttggcctcgcgcgcagatcagttggaagaatttgttcactacgtgaaaggcgagatcaccaaggtagtcggcaaataatgtctaacaattcgttcaagccgacgccgcttcgcggcgcggcttaactcaagcgttagagagctggggaagactatgcgcgatctgttgaaggtggttctaagcctcgtcttgcgatggcatttcgatccattcccattccgcgctcaagatggcttcccctcggcagttcatcagggctaaatcaatctagccgacttgtccggtgaaatgggctgcactccaacagaaacaatcaaacaaacatacacagcgacttattcacacgagctcaaattacaacggtatatatcctgccagtcagcatcatcacaccaaaagttaggcccgaatagtttgaaattagaaagctcgcaattgaggtctacaggccaaattcgctcttagccgtacaatattactcaccggatcctaaccggtttaattaaggcgcgccatgcccgggcaagcggccgcacaagtttgtacaaaaaagcaggcttctagacctaggtggagtcatcacgcagactatctcagcatgtgcgtagcacgcggccgcctcccagtatcattatagtgaaagttttggctctctcgccggtggttttttacctctatttaaaggggttttccacctaaaaattctggtatcattctcactttacttgttactttaatttctcataatctttggttgaaattatcacgcttccgcacacgatatccctacaaatttattatttgttaaacattttcaaaccgcataaaattttatgaagtcccgtctatctttaatgtagtctaacattttcatattgaaatatataatttacttaattttagcgttggtagaaagcataatgatttattcttattcttcttcatataaatgtttaatatacaatataaacaaattctttaccttaagaaggatttcccattttatattttaaaaatatatttatcaaatatttttcaaccacgtaaatctcataataataagttgtttcaaaagtaataaaatttaactccataatttttttattcgactgatcttaaagcaacacccagtgacacaactagccatttttttctttgaataaaaaaatccaattatcattgtattttttttatacaatgaaaatttcaccaaacaatgatttgtggtatttctgaagcaagtcatgttatgcaaaattctataattcccatttgacactacggaagtaactgaagatctgcttttacatgcgagacacatcttctaaagtaattttaataatagttactatattcaagatttcatatatcaaatactcaatattacttctaaaaaattaattagatataattaaaatattacttttttaattttaagtttaattgttgaatttgtgactattgatttattattctactatgtttaaattgttttatagatagtttaaagtaaatataagtaatgtagtagagtgttagagtgttaccctaaaccataaactataagatttatggtggactaattttcatatatttcttattgcttttaccttttcttggtatgtaagtccgtaactggaattactgtgggttgccatgacactctgtggtcttttggttcatgcatggatcttgcgcaagaaaaagacaaagaacaaagaaaaaagacaaaacagagagacaaaacgcaatcacacaaccaactcaaattagtcactggctgatcaagatcgccgcgtccatgtatgtctaaatgccatgcaaagcaacacgtgcttaacatgcactttaaatggctcacccatctcaacccacacacaaacacattgcctttttcttcatcatcaccacaaccacctgtatatattcattctcttccgccacctcaatttcttcacttcaacacacgtcaacctgcatatgcgtgtcatcccatgcccaaatctccatgcatgttccaaccaccttctctcttatataatacctataaatacctctaatatcactcacttctttcatcatccatccatccagagtactactactctactactataataccccaacccaactcatattcaatactactctaggatccacaaccaaaaatggcagcgaggctgcaagagcagaaaggaggtgagatggacacgaggattgcgatcataggcatgagcgccatacttccttgtggaaccacggtgagagagtcatgggagaccataagggctggcattgattgcctgtctgatcttcctgaggatcgtgttgatgtgactgcgtactttgacccagtcaagaccacaaaggacaaaatctactgcaagagaggaggtttcattcctgagtatgactttgatgcgcgtgagtttggtctcaacatgttccagatggaagattctgatgcgaatcagaccatctcacttctcaaggtcaaagaagcacttcaagatgctgggattgatgcacttggaaaggagaagaaaaacataggatgcgtgcttggcattggaggtggacagaagagttcacatgagttctacagcagactcaactatgtggttgtggagaaagtcttgagaaagatggggatgccagaggaagatgtcaaagtggctgtggagaagtacaaagcgaacttcccagaatggagacttgactctttccctggattccttgggaatgtcactgctggcagatgcaccaacacattcaacttggatggcatgaactgcgttgtggatgctgcatgtgcaagctccttgatagcagtcaaggttgcgattgatgaactgctctatggtgactgcgacatgatggtcactggtgcaacctgcacagacaactccattgggatgtacatggctttctcaaagacacctgtgttcagcacggacccaagtgtgagagcgtatgatgagaaaacgaaagggatgctcattggtgagggatcagccatgttggtgctcaaacgttatgcagatgcagtgagggatggtgatgagattcatgctgtgattcgtggttgtgcaagctcaagtgatggcaaagcagctggcatctacactcccacaatcagtggtcaagaggaagccttgagacgtgcatacaatcgtgcctgcgttgaccctgccactgtcactttggttgagggtcatgggactggcactccagttggagataggattgagttgactgcgttgaggaacttgtttgacaaagcgtatggtgaagggaacacagagaaagttgcagttggaagtatcaagtccagtattggtcatttgaaggctgttgctggtcttgctggaatgatcaaggtcatcatggctctcaaacacaagactttgcctggaacgatcaatgtggacaatccacccaatctctatgacaacactcccatcaatgagtcatccctctacatcaacacgatgaacagaccctggttccctccacctggtgttccgagacgtgctggaatatccagctttggctttggaggtgccaactaccatgcagtgttggaagaggctgaaccagagcacacgacagcgtacagactcaacaaacgtccacaaccggtgttgatgatggctgcaactcctgctgcgttgcagagcctttgtgaagctcagctgaaagagtttgaagctgcgatcaaggagaatgagacagtcaagaatactgcctacatcaagtgtgtcaagtttggagaacagttcaagttccctgggagcatacctgcgaccaatgcgagactgggattcttggtcaaagatgcggaggatgcgtgctccacgcttcgtgctatatgtgctcagtttgccaaagatgtgaccaaagaagcgtggaggcttccgagagaaggagtttctttccgtgccaaaggcattgccaccaatggtgctgttgctgcactcttctctggacaaggtgctcagtacacacacatgttcagtgaagttgcgatgaactggcctcagttcagacagtccattgctgcaatggacgctgcacagtccaaggttgctggaagtgacaaagactttgaaagagtctctcaagtcctgtacccaaggaaaccgtacgaacgtgagccagaacaagatcacaagaaaatctcactcacagcatacagccagccgtcaaccctggcatgtgctcttggtgcctttgagattttcaaggaagctggattcactccagactttgcagctggacacagcttgggtgagtttgctgcgctctatgcagctggttgtgttgacagagatgagttgtttgaacttgtttgcagaagggcaaggatcatgggaggcaaagatgcacctgccacacccaaaggttgcatggcagctgtcataggacccaacgcagagaacatcaaggttcaagctgccaacgtctggcttggaaactcaaactctccgtctcagactgtcattactgggtctgttgaagggattcaagctgaaagtgccagattgcagaaggaagggttcagagttgtgcctcttgcttgtgagtctgccttccattctccacagatggaaaatgccagctcagctttcaaagatgtcatatccaaggtttccttccgtacacccaaagcagaaacaaagctcttcagcaatgtttctggagagacctatccgacggatgccagagagatgctcactcaacacatgacctcatctgtgaagttcctgacccaagtgaggaacatgcaccaagctggtgcgagaatctttgttgagtttggaccgaaacaagttctcagcaaacttgtttctgaaaccctcaaagatgacccgtctgttgtcacagtgtctgtgaacccagcttctggcacggactctgacatacagttgagggatgctgcagttcagctggttgtggctggtgtcaatcttcaagggtttgacaagtgggatgctcctgatgccacgaggatgcaagccatcaagaaaaagagaaccacactcagactttcagctgccacctatgtcagtgacaagaccaagaaagtgagggatgctgccatgaacgacggaagatgtgtcacatacctcaagggtgctgcaccactcatcaaggctcctgaacctgtggttgacgaagctgccaagagggaggctgaaaggcttcagaaggagcttcaagacgctcagaggcagcttgacgacgccaaacgtgcagctgcagaagccaactccaaacttgctgctgccaaggaggaagccaagactgctgcagcttcagccaagcctgcagttgacactgctgttgtggagaaacatcgtgccatcctcaagtccatgctggctgagctggatggttatggaagtgttgatgcttcttcccttcagcaacagcaacagcaacagactgctccggcgcctgttaaagccgctgcccctgccgctcccgttgcaagtgctcctgctcccgccgtgtccaacgagttgcttgagaaagctgagacagttgtgatggaggttctcgctgccaagactggatacgaaacagacatgattgaggcggacatggagcttgagactgagttgggaattgacagcatcaagagggttgaaattctttctgaagtccaagctatgcttaacgttgaggcgaaagatgttgatgctctctctaggacgagaacagtgggtgaagttgtcaacgctatgaaggcagaaatcgctggttcttccgctccggcgccggcagctgccgcacctgcaccggctaaagcggctccagctgcagctgcaccagctgtttctaatgagctgctcgaaaaggcagaaactgttgtgatggaagtccttgctgccaaaactggctacgaaactgacatgatagaatcagacatggagcttgagacggagcttggaattgattccatcaagcgtgtggaaatcctcagtgaagtccaagccatgctcaatgtggaagctaaggatgtggatgctctctcaaggaccagaactgtcggtgaggttgtcaatgccatgaaggctgagatagctggaggctccgctcctgcgccggccgctgccgctcctggtcccgctgccgcggctccagctccagctgcagccgctccggccgtctcaaacgaactccttgaaaaagctgagaccgtcgtgatggaggtcttggcagctaaaaccggctatgagactgacatgattgagtctgacatggaattggagacagaacttgggatagacagcatcaaacgtgttgaaatcctcagtgaggtccaagctatgctgaacgtggaagcgaaggatgttgatgctctgtccagaacgaggaccgttggtgaggttgtggatgccatgaaggctgaaattgctggagggtctgcgcccgcgccagctgcagccgctcctgcacccgcagccgcggcacctgctccagctgcacctgcacctgccgtttcttcagaactcttggagaaggctgagacggttgtgatggaggttttggctgcaaagactggctatgagaccgacatgattgaatctgatatggaattggagacagagcttgggatcgattccatcaaaagagtggagatcctgagtgaagtccaagccatgctcaatgttgaagctaaggatgttgatgcactttcaagaacaaggacagtgggtgaggttgtggatgccatgaaggcggagattgctggagggagcgcgcctgcgccagctgccgcggcacctgcaccggcagccgcagctccagctccagctgcaccagcaccggccgcgcccgcgccagctgtttcatccgaactcctggaaaaggccgagacggttgtgatggaggtgctcgcagctaagactggttacgagaccgacatgattgaaagtgacatggagcttgaaaccgagttgggaatagatagcatcaaacgtgttgaaatcttgtctgaggtccaagctatgttgaacgtggaggcaaaagatgtcgatgcgctttcaagaaccagaacagtcggtgaggtcgtggacgccatgaaggctgaaattgccggaagctctgctagtgcgccagctgcagccgcacctgcacctgctgccgcggcacctgctccagctgcagccgctcctgccgtcagcaatgagttgctggagaaagccgaaacagttgtgatggaagtccttgctgcaaaaactggttacgaaacggacatgattgagtcagacatggaattggagaccgaacttggaatagattccatcaagagagtggagatcctctctgaggtgcaagccatgctcaacgttgaggctaaagatgttgatgcactcagtaggacaagaactgtgggggaagttgtcgatgcgatgaaggctgagattgctggaggctctgctcctgcgccggcagctgccgcacctgcacccgcagccgcggcaccagctgtcagcaacgaattgcttgagaaggctgaaacagttgtcatggaagtgctggctgcaaaaaccggctatgagactgacatgattgagtctgacatggaacttgagacggaattgggcattgacagcatcaagcgtgttgagatcctcagtgaagtccaagcaatgctcaatgtggaggctaaggatgtggatgccctctcaaggaccagaacagttggtgaggtcgttgatgcgatgaaggcggagatcgctggaagttccgcgcctgcgccagctgcagccgctcctgcacccgcagccgcggcaccggctccagctgcagccgcaccggccgtctcctcagaactcctggaaaaggctgagacagttgtgatggaagtccttgctgcgaaaactggctatgagaccgacatgattgaatctgacatggaactggagaccgagcttggaattgactccatcaaacgtgttgaaatcctctctgaggttcaagcgatgttgaatgtggaggccaaagatgttgatgctctttccagaacaaggacggtgggagaggtggttgatgccatgaaggctgagatagctgggggttctgctcctgcgccagctgcagccgctcctgctcccgctgccgcggcaccagctgtcagcaacgaactccttgaaaaagctgaaactgttgtgatggaggttttggctgcaaagactggatacgagactgacatgatagagtcagacatggagttggaaacagagcttgggattgatagcatcaagcgtgtggaaatcctttctgaggttcaagccatgctgaacgttgaggccaaagatgtcgatgctttgtcaaggaccagaacggttggagaagtggtcgatgccatgaaggctgagatagctggtggatcagcccctgctccggctgcagccgctcctgcaagtgccggtgctgcaccagctgtgaagattgattcagttcatggtgctgactgtgacgatttgtcactgatgcacgcaaaggtggttgacatcagaaggccagatgaactgattctggaaagaccggagaaccgtccagttcttgtcgttgacgatggctcagagttgacacttgctcttgtgagggtgttgggagcctgtgcagttgtcttgacctttgagggattgcagttggctcagagagctggtgcagctgccattcgtcatgttctggctaaggacctttcagcagaatcagctgagaaggccatcaaagaggctgagcaaagatttggagcgttgggaggcttcataagccagcaagcagaaaggtttgaaccagctgagatactgggtttcacactcatgtgtgcgaagtttgccaaagcctctctctgcactgctgtggctggaggtcgtcctgccttcatcggtgtggctaggcttgacggcagacttggattcacctctcaaggcacttctgacgcactcaagagagcacagcgtggagcgatctttggactctgcaagacaatagggttggagtggtcagaatctgatgtgttcagccgtggtgtggacattgctcaagggatgcacccagaagatgctgcagttgccatagttagggagatggcgtgtgctgacatcagaatcagagaggttgggattggagcaaaccagcaaagatgcacaatcagagctgccaagttggagactgggaaccctcagagacagatagcgaaagacgatgtgcttctggtttctggaggtgctcgtgggatcacacctctttgcatccgtgagatcacgcgtcagattgctggaggcaagtacattctgttgggtcgtagcaaagtttctgcgtctgaaccagcatggtgtgctggcatcactgatgagaaggctgtgcagaaagctgccacccaagagttgaagagggccttcagtgctggtgaaggacccaaacccactccaagggctgtcacgaaacttgtgggatctgttcttggtgctcgtgaagtgagaagctccattgctgccattgaagctctgggtggcaaagcgatctacagctcttgtgatgtgaactctgctgcagatgttgccaaagcagttagggatgcagagtcccagcttggtgccagagttagtggaatcgttcacgcttctggtgtgctccgtgatcgtctcatagagaagaaactccctgacgagtttgatgctgtctttgggaccaaagtcactgggttggagaatcttctggctgcagttgatcgtgccaacctcaaacacatggttctcttcagctcccttgctggtttccacggcaatgttggtcagtctgactatgcgatggcaaacgaagctctcaacaagatgggtttggaacttgcgaaggatgtcagtgtcaagtccatctgctttggtccctgggatggtgggatggtgacacctcaactcaagaaacagtttcaagaaatgggagttcagatcattcctcgtgaaggaggtgctgatacagttgcgaggattgtgttgggatcaagtcctgctgagatccttgttggaaactggaggacaccatccaagaaagttggaagtgacacgatcaccctgcatagaaagatcagtgccaagtccaatcccttcttggaggatcatgtcatacaaggcagaagggtgttgccaatgacccttgctattgggagccttgctgagacctgccttggactcttccctggctactctctctgggccatagatgacgcacagctcttcaaaggtgtcactgttgatggagacgtcaactgtgaagtgaccctcacaccgtccactgctccgagtgggagggtgaatgtccaagcgacgctcaagacgttctcaagtggaaaacttgttccagcctacagagctgtcatagtgttgtccaaccaaggtgctccacctgccaatgcaaccatgcagcctccgagccttgatgcagatcctgctttgcaagggtcagtctatgatggcaagactctctttcatggtcctgcgttcagaggcattgatgacgttctcagctgcaccaagagccagcttgttgccaagtgttctgctgttcctggatcagatgcagccagaggagagtttgcaactgacactgatgcacatgatccctttgtcaatgatcttgcctttcaagcaatgttggtctgggtgaggagaacgctgggacaagctgcactcccgaactccattcagaggatagtccaacacagaccggtcccacaagacaaacccttctacatcaccctcagatccaatcagagtggtggacatagccagcacaaacatgcacttcagttccacaacgaacaaggtgatctcttcattgatgttcaagcctctgtcattgcgacagactcacttgcgttctgagtagttagcttaatcacttaggtcacctcgagtatcaaaatctatttagaaatacacaatattttgttgcaggcttgctggagaatcgatctgctatcataaaaattacaaaaaaattttatttgcctcaattattttaggattggtattaaggacgcttaaattatttgtcgggtcactacgcatcattgtgattgagaagatcagcgatacgaaatattcgtagtactatcgataatttatttgaaaattcataagaaaagcaaacgttacatgaattgatgaaacaatacaaagacagataaagccacgcacatttaggatattggccgagattactgaatattgagtaagatcacggaatttctgacaggagcatgtcttcaattcagcccaaatggcagttgaaatactcaaaccgccccatatgcaggagcggatcattcattgtttgtttggttgcctttgccaacatgggagtccaaggttggcgcgccgaattcgcggccgcttaattaagatgagtgatactcaggactcaggactcactctgctgatcactagtgctagcctcgaggtcgacacaactttgtatacaaaagttgtctagacctaggctcagcaactcatccagtcaagttcgagtcagtgagttgggcggccgcctcccagtatcattatagtgaaagttttggctctctcgccggtggttttttacctctatttaaaggggttttccacctaaaaattctggtatcattctcactttacttgttactttaatttctcataatctttggttgaaattatcacgcttccgcacacgatatccctacaaatttattatttgttaaacattttcaaaccgcataaaattttatgaagtcccgtctatctttaatgtagtctaacattttcatattgaaatatataatttacttaattttagcgttggtagaaagcataatgatttattcttattcttcttcatataaatgtttaatatacaatataaacaaattctttaccttaagaaggatttcccattttatattttaaaaatatatttatcaaatatttttcaaccacgtaaatctcataataataagttgtttcaaaagtaataaaatttaactccataatttttttattcgactgatcttaaagcaacacccagtgacacaactagccatttttttctttgaataaaaaaatccaattatcattgtattttttttatacaatgaaaatttcaccaaacaatgatttgtggtatttctgaagcaagtcatgttatgcaaaattctataattcccatttgacactacggaagtaactgaagatctgcttttacatgcgagacacatcttctaaagtaattttaataatagttactatattcaagatttcatatatcaaatactcaatattacttctaaaaaattaattagatataattaaaatattacttttttaattttaagtttaattgttgaatttgtgactattgatttattattctactatgtttaaattgttttatagatagtttaaagtaaatataagtaatgtagtagagtgttagagtgttaccctaaaccataaactataagatttatggtggactaattttcatatatttcttattgcttttaccttttcttggtatgtaagtccgtaactggaattactgtgggttgccatgacactctgtggtcttttggttcatgcatggatcttgcgcaagaaaaagacaaagaacaaagaaaaaagacaaaacagagagacaaaacgcaatcacacaaccaactcaaattagtcactggctgatcaagatcgccgcgtccatgtatgtctaaatgccatgcaaagcaacacgtgcttaacatgcactttaaatggctcacccatctcaacccacacacaaacacattgcctttttcttcatcatcaccacaaccacctgtatatattcattctcttccgccacctcaatttcttcacttcaacacacgtcaacctgcatatgcgtgtcatcccatgcccaaatctccatgcatgttccaaccaccttctctcttatataatacctataaatacctctaatatcactcacttctttcatcatccatccatccagagtactactactctactactataataccccaacccaactcatattcaatactactctaggatccacaaccaaaaatggctgcaaggaacgtgagtgcggctcatgagatgcatgacgagaagaggatagctgttgtgggcatggctgttcagtatgctggatgcaaaacgaaagacgagttctgggaagttctcatgaatggaaaagttgagagcaaagtgatcagcgacaaacgtcttggttcaaattaccgtgctgaacactacaaagctgaaaggagcaagtatgctgacaccttctgcaatgagacatatggaactcttgatgagaacgaaatagacaatgagcatgaactccttttgaaccttgccaaacaagccttggctgaaacatctgtcaaagattcaacaagatgtggcatagtttctggatgcctcagcttcccgatggacaacctccaaggtgaactcttgaatgtgtaccagaaccatgttgagaagaaacttggtgccagagttttcaaagatgcctctcactggtcagaaagagaacagtccaacaaaccagaggctggtgacagaagaatcttcatggaccctgcttcctttgttgctgaggaactcaatcttggcgctctccactactctgttgatgctgcctgtgccactgcgctctatgtgctcagactggcgcaagatcacttggtctctggtgcagctgatgtgatgctttgtggtgcaacatgcctgccggagccgtttttcatactctctgggttctcaaccttccaagccatgcctgttggaacgggtcagaatgtgtccatgccgctgcacaaagattctcaaggattgacccctggtgaaggaggttccatcatggtcctcaaacgtttggatgacgcaatcagagatggagatcacatctatggaacacttttgggagccaatgtcagcaacagtggcactggtctgccacttaaaccccttttgccgtcagagaaaaagtgcctcatggacacctacacacgtatcaatgtgcatccccacaagattcagtatgttgaatgccatgcaactgggactccacaaggtgatcgtgtggaaattgatgctgtgaaggcttgctttgaaggcaaagtcccacgttttggaaccacaaaagggaactttggacacacattggtggcagctgggtttgctggcatgtgcaaagtgcttctctccatgaagcacgggatcattccacccactccgggaatagatgacgaaacgaagatggaccctctggttgtctctggtgaggccattccctggccagaaacgaatggagaaccgaagcgtgctggtctctcagcgtttggatttggtgggaccaatgctcatgctgtctttgaggaacatgacccaagcaatgctgcatgcactggccatgactccatttctgctctctctgcacgttgtggtggtgagtcaaacatgagaatagcaatcactgggatggatgccacttttggtgctttgaaaggattggatgcttttgaaagggccatctacactggtgctcatggtgctataccactcccagaaaagagatggagattcctggggaaagacaaggacttccttgatctttgtggagtcaaagcaacaccgcatggctgttacattgaagatgttgaagttgatttccagaggctgaggactccaatgactcctgaagatatgctcttgcctcaacagcttctggctgtcaccacaattgatagggccatattggactctggcatgaagaaaggtggaaatgtggctgtctttgtggggttggggaccgatcttgaactctaccgtcaccgtgcaagggttgctctcaaggagagagtgaggcctgaagccagcaagaaactcaatgacatgatgcagtacatcaatgattgtgggacaagcacttcttacaccagctacataggcaacttggttgcaacaagggtcagttcacaatggggcttcacgggaccttccttcacaatcacagaaggcaacaattctgtgtacagatgtgctgaacttggcaaatacctcttggaaacgggagaggttgatggggttgtggttgcgggtgttgatctctgtgggagtgctgagaacctttacgtcaagtcaaggcgtttcaaggtgtctacatctgacaccccgagagccagctttgatgcagctgctgatggttactttgttggagagggctgtggtgcatttgtgctcaagcgtgagacaagctgcaccaaggatgacagaatctatgcttgcatggatgccatagttcctggaaatgttccatctgcatgtttgagagaggcattggatcaagccagagtcaagcctggagacatcgagatgttggagctttctgctgattcagcgaggcatttgaaggacccgtctgttctcccaaaggaactcactgctgaggaagagattggcggacttcagacgattcttcgtgacgatgacaagctcccaaggaatgttgcaactggaagtgtcaaggccactgttggtgacactggttatgcttctggtgctgccagtttgattaaggctgcgctttgcatctacaaccgttacctgcccagcaatggagatgactgggatgaacctgcacctgaagcaccctgggacagcacactctttgcgtgccagacctcaagagcttggttgaagaaccctggtgagagacgttatgcggctgtttccggagtcagtgaaaccagaagttgctacagtgtgctgctttctgaagcagagggacactacgagagagagaacagaatcagtttggatgaggaagcacccaagctcattgtgttgagagcagactcccatgaagagattcttggaagattggacaagataagggaaaggttcttgcagcccacgggtgctgcacccagagagtctgaattgaaggcgcaagcccgtaggatctttcttgaactccttggtgagacccttgcccaagatgcagcttcatctggaagtcagaagccccttgctctcagcttggtctccactccatccaagctccagagagaggtggaacttgcggcaaaaggcattccgagatgtctcaagatgagacgtgattggagttcccctgctggaagcagatatgcgcctgagcctttggccagtgacagagttgccttcatgtatggagaaggaaggagcccttactatggcatcacacaagacattcataggatttggcctgaacttcatgaggtcatcaatgagaaaacaaaccgtctctgggctgaaggtgacagatgggtcatgccaagggccagcttcaagagtgagcttgagtcacaacagcaagagtttgacagaaacatgattgaaatgttccgtcttggaatcctcacctcaattgccttcacaaacctggcgagagatgttctcaacatcacgcccaaagcagcctttggactcagtttgggagagatttccatgatctttgctttctccaagaaaaacggtttgataagcgatcagttgacaaaggatttgagagagtcagatgtctggaacaaagctctggctgttgagttcaatgcgctcagagaagcctggggcattccacagtctgtcccaaaagatgagttctggcaaggttacatagtgaggggaacgaaacaagacatagaagcagccatagcaccagactcaaagtatgtgaggttgaccatcatcaatgatgccaacactgctctcatcagtggaaagcctgatgcatgcaaagctgcgattgctcgtcttggtggcaacatccctgcgcttccagtcactcaaggcatgtgtgggcattgcccagaggtgggaccttacaccaaggacatcgcaaagatccacgccaaccttgagttccctgtggttgatggtcttgatctctggactaccataaaccagaagaggcttgtgccaagagccacgggtgccaaagatgaatgggctccttcatcctttggggagtatgctggacagctctatgagaaacaagccaacttccctcagatagttgaaaccatctacaagcagaactatgatgtgtttgttgaagttgggccaaacaatcacagaagcacagcagtgagaaccacgcttggaccacagagaaaccaccttgctggtgccatagacaagcagaacgaggatgcttggacgacaatagtcaagctcgtggcttcattgaaggctcaccttgttcctggagtgaccatcagtccgctctaccactccaagctcgttgcagaggctgaggcttgttatgctgcgctctgtaaaggtgagaaacccaagaaaaacaagtttgtgagaaagattcagttgaatggcagattcaacagcaaggcagaccccatctcctcagcagaccttgcatccttcccacctgcggaccctgcgattgaagctgccatctcttcaaggatcatgaagcctgtggctccgaaattctatgcgcgtctcaacattgatgagcaagatgagaccagagatccgatcttgaacaaggacaatgcgccttccagctccagctcttccagcagttcctcttccagcagttcatctccgtctcctgctccttcagctccagttcagaagaaagctgccccagctgcggagacaaaagctgttgccagtgctgatgcacttcgtagtgccctgcttgatcttgactccatgcttgcgctcagctctgcaagtgcttctggcaaccttgttgagactgcgccatctgatgccagtgtcattgtccctccgtgcaacattgctgatcttggcagcagagctttcatgaaaacttatggtgtttctgcgcctctgtacaccggtgcaatggccaagggaattgcctctgcggacttggtgatcgcagctggaaggcaaggaatccttgcgtcatttggtgctggaggccttccaatgcaagttgtgcgtgagtccattgaaaagattcaagctgccctgcccaatggaccatatgctgtcaacctcatccattctccttttgacagcaaccttgagaagggaaatgttgatctcttcttggaaaagggtgtcacttttgttgaggcttcagccttcatgacgttgacaccgcaagttgtcagatacagagcggctgggttgacgaggaatgcagatgggtcagtcaacataaggaacagaatcattgggaaagtctccagaactgagctggctgaaatgttcatgcgtcctgcacctgagcatcttttgcagaagctcattgcttctggggagatcaatcaagaacaagctgagttggccagacgtgttcctgtggctgatgacattgcggttgaagctgattctggtggacacactgacaaccgtccaatccatgtcattctgcctctgattatcaacctgagggataggcttcacagagagtgtggatacccagcaaacctgagggttcgtgttggtgctgggggtggcattgggtgtccccaagctgcgctggcaactttcaacatgggtgcctctttcattgtcactggaacagtgaaccaagttgccaaacaatctgggacgtgtgacaatgtgaggaaacagcttgcgaaagcaacttactcagatgtttgcatggcaccggcagctgacatgtttgaggaaggtgtgaaacttcaagttttgaagaaaggaacaatgttcccttcaagagccaacaaactctatgagttgttctgcaagtatgattcttttgagtccatgcctccagcagagcttgcgagggttgagaaaagaatcttcagtcgtgcattggaagaggtctgggatgagaccaagaacttctacatcaaccgtctccacaacccagagaagatacagagggctgagagggaccccaaactgaagatgtcactgtgtttcagatggtatctgtccctggcttcaaggtgggccaacactggagcttctgacagagtcatggactaccaagtttggtgtggtcctgccattggttcattcaatgatttcatcaaaggaacttaccttgatccggcagtggcaaatgagtacccgtgtgttgtgcagatcaacaaacagattcttagaggagcgtgcttcttgaggcgtcttgaaatactgagaaatgcaaggctttcagatggtgcagctgcacttgtggcgagcattgatgacacatatgtccctgctgagaagctgtgagtagttagcttaatcacttaggtcacctcgagtatcaaaatctatttagaaatacacaatattttgttgcaggcttgctggagaatcgatctgctatcataaaaattacaaaaaaattttatttgcctcaattattttaggattggtattaaggacgcttaaattatttgtcgggtcactacgcatcattgtgattgagaagatcagcgatacgaaatattcgtagtactatcgataatttatttgaaaattcataagaaaagcaaacgttacatgaattgatgaaacaatacaaagacagataaagccacgcacatttaggatattggccgagattactgaatattgagtaagatcacggaatttctgacaggagcatgtcttcaattcagcccaaatggcagttgaaatactcaaaccgccccatatgcaggagcggatcattcattgtttgtttggttgcctttgccaacatgggagtccaaggttggcgcgccgaattcgcggccgcttaattaatctgacctgaccactagacctgagtgagtacagatgtgctactagtgctagcctcgaggtcgaccaacttttctatacaaagttgtctagacctaggactaggcactgagtgactcactgacctgactgagtgactggcggccgcctcccagtatcattatagtgaaagttttggctctctcgccggtggttttttacctctatttaaaggggttttccacctaaaaattctggtatcattctcactttacttgttactttaatttctcataatctttggttgaaattatcacgcttccgcacacgatatccctacaaatttattatttgttaaacattttcaaaccgcataaaattttatgaagtcccgtctatctttaatgtagtctaacattttcatattgaaatatataatttacttaattttagcgttggtagaaagcataatgatttattcttattcttcttcatataaatgtttaatatacaatataaacaaattctttaccttaagaaggatttcccattttatattttaaaaatatatttatcaaatatttttcaaccacgtaaatctcataataataagttgtttcaaaagtaataaaatttaactccataatttttttattcgactgatcttaaagcaacacccagtgacacaactagccatttttttctttgaataaaaaaatccaattatcattgtattttttttatacaatgaaaatttcaccaaacaatgatttgtggtatttctgaagcaagtcatgttatgcaaaattctataattcccatttgacactacggaagtaactgaagatctgcttttacatgcgagacacatcttctaaagtaattttaataatagttactatattcaagatttcatatatcaaatactcaatattacttctaaaaaattaattagatataattaaaatattacttttttaattttaagtttaattgttgaatttgtgactattgatttattattctactatgtttaaattgttttatagatagtttaaagtaaatataagtaatgtagtagagtgttagagtgttaccctaaaccataaactataagatttatggtggactaattttcatatatttcttattgcttttaccttttcttggtatgtaagtccgtaactggaattactgtgggttgccatgacactctgtggtcttttggttcatgcatggatcttgcgcaagaaaaagacaaagaacaaagaaaaaagacaaaacagagagacaaaacgcaatcacacaaccaactcaaattagtcactggctgatcaagatcgccgcgtccatgtatgtctaaatgccatgcaaagcaacacgtgcttaacatgcactttaaatggctcacccatctcaacccacacacaaacacattgcctttttcttcatcatcaccacaaccacctgtatatattcattctcttccgccacctcaatttcttcacttcaacacacgtcaacctgcatatgcgtgtcatcccatgcccaaatctccatgcatgttccaaccaccttctctcttatataatacctataaatacctctaatatcactcacttctttcatcatccatccatccagagtactactactctactactataataccccaacccaactcatattcaatactactctaggatccacaaccaaaaatggcgcttcgtgtcaagaccaacaagaagccatgttgggagatgaccaaggaggaactgacctctggcaaaactgaggtgttcaactatgaggaactcctggagtttgcagagggtgacatagctaaggtttttggtccggagtttgctgtcatagacaagtaccccagaagggtgaggctgcctgctcgtgaatacctgcttgtgacaagggtcacactcatggatgccgaggtcaacaactacagagttggtgccagaatggtcactgagtatgatcttccagtgaatggcgaattgtctgagggaggtgattgtccctgggcagttctggttgagagtggacagtgcgatttgatgctgatatcatacatgggaattgatttccagaaccaaggtgacagagtttaccgtctgctcaacaccacgttgacattctatggggttgcccatgagggagagacccttgagtatgacatcagagtgaccggttttgccaaacgtttggatggtggcatctccatgttcttctttgagtatgactgctatgtcaatgggaggcttctcattgagatgagagatggctgtgctggcttcttcacaaatgaggagcttgatgcgggaaagggtgtggtgttcacaagaggggatttggctgccagagctaagattccaaagcaagatgtttctccctatgctgtcgctccctgccttcacaaaacaaaactcaacgaaaaggagatgcagaccttggttgacaaagattgggcttccgtttttggctcaaagaatggcatgccggagatcaactacaaactctgcgcacgtaagatgctcatgattgatagagtcaccagcattgaccataagggaggtgtgtacggtttgggtcagttggttggtgagaaaatcttggagagggaccattggtacttcccatgccattttgttaaggatcaagtcatggctggatctcttgtcagcgacggttgttcacaaatgctcaagatgtacatgatctggctcggtttgcaccttaccaccggaccatttgacttcagacccgtcaacggacacccgaacaaagttaggtgtaggggtcagatatctcctcataagggaaagttggtctacgtcatggagatcaaagagatgggattcgacgaggataacgatccgtacgccattgctgacgtcaacatcattgacgttgatttcgaaaagggtcaagatttcagccttgatagaatcagcgactacggaaagggggatcttaacaaaaagatcgtcgtggacttcaagggcattgctctcaagatgcagaagagatccacgaacaagaacccctccaaagttcagcccgtttttgctaacggtgcagccactgtgggaccggaagcgtccaaggccagctctggtgccagtgctagtgcttctgctgcccctgcgaagcctgctttctcagcagatgttcttgcgccaaagccagttgcacttcctgaacatatcctcaagggtgacgctctcgctccgaaagaaatgtcctggcatcccatgtcaaaacttcctggcaacccgacgccgttcttctcccctagttcttaccctccgagggcaatttgcttcatccctttccctggcaacccacttgacaacaattgcaaagctggagaaatgcctctgaactggtacaacatgtcagagttcatgtgtggaaaagttagcaactgcttgggaccagagttcgcaagatttgataagtcaaatacgagcagaagccctgcttttgatttggctcttgtgactagagttgttgaagtcacaaacatggaacatggcaagttcctgaatgttgattgcaatcccagcaaaggcacaatggtgggggagtttgactgtcctcaagatgcgtggttctttgatggttcttgcaatgatgggcacatgccttattccatcatcatggaaatcggacttcagacatccggtgttctcaccagtgtgttgaaagcaccactgacgatggacaaagatgacattctctttaggaaccttgatgcaagtgctgaaatggtgaggccagatgtggatgtgagggggaaaaccataaggaatgtgaccaagtgcactggatatgcaatgttgggaaagatggggattcacagattcacgtttgagttgtctgttgatggcgtggttttctacaaaggaagcacttcctttggatggttcactccagaggtgtttgctcagcaagctggacttgacaatgggaaaaagacggagccttggtgcaaaactaacaacacgagtgtgagaagagttgaaatcgcatcagccaaaggcaaagaacagctgactgagaaacttccagatgcaactaatgctcaagttctcagaaggtcagaacagtgtgagtatttggattacctcaacattgctcctgattctgggctgcatgggaaaggatatgcgcatggacacaaagatgttaacccacaagactggttcttctcttgtcacttttggtttgatcctgtgatgcctggatctttgggaattgagtcaatgttccagctcattgaggcatttgcggtggaccagaacataccgggagaatacaatgtgagcaatccgacctttgcccatgcccctggaaaaacggcgtggaagtaccgtggtcaattgacaccaaagaaccgtgcgatggactgtgaggtgcacatagtttcaatcacagcctctcctgaaaatggaggctacgttgacatagtggcagatggagcactttgggttgatggtctccgtgtgtatgaagccaaagaactcagagttcgtgttgtcagtgcaaaacctcaagccattccggatgttcaacaacagccacccagcgcaaaagcggaccctgggaaaactggagttgcactcagtccgactcagttgagagatgtcctgcttgaagtggacaatccattgtatcttggtgttgaaaactccaatttggtgcagtttgaatccaaacctgcaacttcttcaaggattgtcagtatcaaaccatgctccataagtgatcttggtgacaagtccttcatggaaacgtacaatgtgtcagcacctctgtacactggagcaatggccaagggaattgcgtctgcggaccttgtcattgctgctgggaagaggaagatattgggttcttttggagcgggtgggcttccaatgcaccatgtgagggcagctttggagaagatacaagcggctctgcctcaaggaccatatgctgtgaacctcattcattcaccttttgacagcaacttggaaaaggggaatgttgatctcttcctcgaaaagggcgttactgtggtggaggcttctgcattcatgaccctcactccccaagttgttcgttaccgtgcagccggactctcaaggaacgctgatgggagtgtcaacatcagaaaccgtatcattggaaaagtgtccagaacagaactcgccgaaatgttcatcagaccggctccggaacacctccttgagaaactcatagcttctggtgagataacacaagaacaagccgaacttgcccgtcgtgttcctgtcgcagacgacatcgctgttgaagctgattctggtggtcacactgacaaccgtcccatccacgtcatcttgcctttgatcatcaaccttaggaacagactgcacagagagtgtggttatcctgcgcaccttagagtcagagttggagctggaggcggtgttggctgcccacaagctgctgcggctgccctcacaatgggagctgccttcatagtgactgggactgtcaatcaagttgctaaacagtccgggacatgtgacaacgtgagaaaacaactcagtcaagccacctacagtgacatttgcatggctccagcagctgatatgtttgaggaaggtgtgaaactccaagttctcaagaagggaacaatgttcccatcaagagctaacaaattgtacgaactcttttgcaagtacgactctttcgattcaatgcctcctgctgaacttgaaaggatcgagaagaggatcttcaagagggcacttcaagaggtctgggaagagaccaaggacttttacatcaatggtttgaagaatccagagaagatacagagagcggaacatgaccccaaactcaagatgtctttgtgtttcagatggtatcttggtcttgcatcacgttgggccaacatgggtgctcctgatcgtgtcatggactatcaagtctggtgtggtccagccattggagccttcaatgacttcatcaaaggaacatatcttgatcctgctgtctctaatgagtacccatgtgttgtccagatcaaccttcagattttgcgtggtgcatgttacctgaggcgtcttaatgctctgagaaatgatccgaggattgatcttgagactgaagatgctgcctttgtctatgagccaacgaatgcgctttgagtagttagcttaatcacttaggtcacctcgagtatcaaaatctatttagaaatacacaatattttgttgcaggcttgctggagaatcgatctgctatcataaaaattacaaaaaaattttatttgcctcaattattttaggattggtattaaggacgcttaaattatttgtcgggtcactacgcatcattgtgattgagaagatcagcgatacgaaatattcgtagtactatcgataatttatttgaaaattcataagaaaagcaaacgttacatgaattgatgaaacaatacaaagacagataaagccacgcacatttaggatattggccgagattactgaatattgagtaagatcacggaatttctgacaggagcatgtcttcaattcagcccaaatggcagttgaaatactcaaaccgccccatatgcaggagcggatcattcattgtttgtttggttgcctttgccaacatgggagtccaaggttggcgcgccgaattcgcggccgcttaattaatcacgagtggatgactgtcacgactgactcatgactgactactagtgctagcctcgaggtcgacacaactttgtataataaagttgtctagacctaggagctgtgctgggtaactcacatgagtcactggtcacatcagcggccgcctcccagtatcattatagtgaaagttttggctctctcgccggtggttttttacctctatttaaaggggttttccacctaaaaattctggtatcattctcactttacttgttactttaatttctcataatctttggttgaaattatcacgcttccgcacacgatatccctacaaatttattatttgttaaacattttcaaaccgcataaaattttatgaagtcccgtctatctttaatgtagtctaacattttcatattgaaatatataatttacttaattttagcgttggtagaaagcataatgatttattcttattcttcttcatataaatgtttaatatacaatataaacaaattctttaccttaagaaggatttcccattttatattttaaaaatatatttatcaaatatttttcaaccacgtaaatctcataataataagttgtttcaaaagtaataaaatttaactccataatttttttattcgactgatcttaaagcaacacccagtgacacaactagccatttttttctttgaataaaaaaatccaattatcattgtattttttttatacaatgaaaatttcaccaaacaatgatttgtggtatttctgaagcaagtcatgttatgcaaaattctataattcccatttgacactacggaagtaactgaagatctgcttttacatgcgagacacatcttctaaagtaattttaataatagttactatattcaagatttcatatatcaaatactcaatattacttctaaaaaattaattagatataattaaaatattacttttttaattttaagtttaattgttgaatttgtgactattgatttattattctactatgtttaaattgttttatagatagtttaaagtaaatataagtaatgtagtagagtgttagagtgttaccctaaaccataaactataagatttatggtggactaattttcatatatttcttattgcttttaccttttcttggtatgtaagtccgtaactggaattactgtgggttgccatgacactctgtggtcttttggttcatgcatggatcttgcgcaagaaaaagacaaagaacaaagaaaaaagacaaaacagagagacaaaacgcaatcacacaaccaactcaaattagtcactggctgatcaagatcgccgcgtccatgtatgtctaaatgccatgcaaagcaacacgtgcttaacatgcactttaaatggctcacccatctcaacccacacacaaacacattgcctttttcttcatcatcaccacaaccacctgtatatattcattctcttccgccacctcaatttcttcacttcaacacacgtcaacctgcatatgcgtgtcatcccatgcccaaatctccatgcatgttccaaccaccttctctcttatataatacctataaatacctctaatatcactcacttctttcatcatccatccatccagagtactactactctactactataataccccaacccaactcatattcaatactactctaggatccacaaccaaaaatgcttcagcacacttggcttccgaagcctcccaatctgaccctcttgtcagatgaggttcatctctggaggattcctcttgaccagcctgagtcacaacttcaagaccttgctgccaccctgagcagtgatgaattggcgagggcaaacagattctactttccagaacacagaaggcgtttcactgctgggagaggcatcctcagatccatcttgggtggatacttgggagtggaaccgggtcaagtcaagtttgattatgagtcccgtgggaaaccgatccttggtgacagatttgctgagagtggactcctgttcaacttgtctcacagccagaaccttgccttgtgtgctgtcaactacacgcgtcaaataggcattgatcttgaatatctgcgtccaacatctgacttggagtctcttgcaaagaggttctttctcccaagagaatatgaactcttgaggtcactccctgatgagcagaaacagaagattttctttcgttactggacttgcaaagaggcttatctcaaagcaacgggagatggaatagccaaacttgaagagatcgagatagcactcaccccaacagaacctgccaagctccaaacagctcctgcgtggtctctgttggagcttgtgccagatgacaattgtgttgcagctgtggctgttgcgggttttggttggcagcccaagttctggcattactgagtagttagcttaatcacttaggtcacctcgagtatcaaaatctatttagaaatacacaatattttgttgcaggcttgctggagaatcgatctgctatcataaaaattacaaaaaaattttatttgcctcaattattttaggattggtattaaggacgcttaaattatttgtcgggtcactacgcatcattgtgattgagaagatcagcgatacgaaatattcgtagtactatcgataatttatttgaaaattcataagaaaagcaaacgttacatgaattgatgaaacaatacaaagacagataaagccacgcacatttaggatattggccgagattactgaatattgagtaagatcacggaatttctgacaggagcatgtcttcaattcagcccaaatggcagttgaaatactcaaaccgccccatatgcaggagcggatcattcattgtttgtttggttgcctttgccaacatgggagtccaaggttggcgcgccgaattcgcggccgcttaattaactactgtcactgaggccgtagacgagtacggactgatctaactagtgctagcctcgaggtcgacacccagcttt

SEQ ID NO: 43 - DNA, 35836 bp, Artificial sequence
  plasmid pDAB7380
cttgtacaaagtggttgcggccgcttaattaaatttaaattcaattaatgcaatcttgattttcaacaacgaaggtaatggcgtaaaagaaaaaatgtatgttattgtattgatctttcatgatgttgaagcgtgccataatatgatgatgtataattaaaatattaactgtcgcattttattgaaatggcactgttatttcaaccatatctttgattctgttacatgacacgactgcaagaagtaaataatagacgccgttgttaaagaattgctatcatatgtgcctaactagagggaatttgagcgtcagacctaatcaaatattacaaaatatctcactctgtcgccagcaatggtgtaatcagcgcagacaaatggcgtaaagatcgcggaaaaacctccccgagtggcatgatagctgcctctgtattgctgatttagtcagccttatttgacttaagggtgccctcgttagtgacaaattgctttcaaggagacagccatgccccacactttgttgaaaaacaaattgcctttggggagacggtaaagccagttgctcttcaataaggaatgtcgaggaggcaatgtaaccgcctctggtagtacacttctctaatccaaaaatcaatttgtattcaagataccgcaaaaaacttatggtttaaaccctgcaggactagtccagaaggtaattatccaagatgtagcatcaagaatccaatgtttacgggaaaaactatggaagtattatgtaagctcagcaagaagcagatcaatatgcggcacatatgcaacctatgttcaaaaatgaagaatgtacagatacaagatcctatactgccagaatacgaagaagaatacgtagaaattgaaaaagaagaaccaggcgaagaaaagaatcttgaagacgtaagcactgacgacaacaatgaaaagaagaagataaggtcggtgattgtgaaagagacatagaggacacatgtaaggtggaaaatgtaagggcggaaagtaaccttatcacaaaggaatcttatcccccactacttatccttttatatttttccgtgtcatttttgcccttgagttttcctatataaggaaccaagttcggcatttgtgaaaacaagaaaaaatttggtgtaagctattttctttgaagtactgaggatacaacttcagagaaatttgtaagtttgtaggtaccagatctggatcccaaaccatgtctccggagaggagaccagttgagattaggccagctacagcagctgatatggccgcggtttgtgatatcgttaaccattacattgagacgtctacagtgaactttaggacagagccacaaacaccacaagagtggattgatgatctagagaggttgcaagatagatacccttggttggttgctgaggttgagggtgttgtggctggtattgcttacgctgggccctggaaggctaggaacgcttacgattggacagttgagagtactgtttacgtgtcacataggcatcaaaggttgggcctaggatctacattgtacacacatttgcttaagtctatggaggcgcaaggttttaagtctgtggttgctgttataggccttccaaacgatccatctgttaggttgcatgaggctttgggatacacagcccggggtacattgcgcgcagctggatacaagcatggtggatggcatgatgttggtttttggcaaagggattttgagttgccagctcctccaaggccagttaggccagttacccaaatctgagtagttagcttaatcacctagagctcgatcggcggcaatagcttcttagcgccatcccgggttgatcctatctgtgttgaaatagttgcggtgggcaaggctctctttcagaaagacaggcggccaaaggaacccaaggtgaggtgggctatggctctcagttccttgtggaagcgcttggtctaaggtgcagaggtgttagcgggatgaagcaaaagtgtccgattgtaacaagatatgttgatcctacgtaaggatattaaagtatgtattcatcactaatataatcagtgtattccaatatgtactacgatttccaatgtctttattgtcgccgtatgtaatcggcgtcacaaaataatccccggtgactttcttttaatccaggatgaaataatatgttattataatttttgcgatttggtccgttataggaattgaagtgtgcttgaggtcggtcgccaccactcccatttcataattttacatgtatttgaaaaataaaaatttatggtattcaatttaaacacgtatacttgtaaagaatgatatcttgaaagaaatatagtttaaatatttattgataaaataacaagtcaggtattatagtccaagcaaaaacataaatttattgatgcaagtttaaattcagaaatatttcaataactgattatatcagctggtacattgccgtagatgaaagactgagtgcgatattatggtgtaatacataggaattcgtttaaacgatctgcgtctaattttcggtccaacttgcacaggaaagacgtcgaccgcggtagctcttgcccagcagactgggcttccagtcctttcgctcgatcgggtccaatgttgtcctcagctgtgaaccggaagcggacgaccaacagtggaagaactgaaaggaacgagccgtctataccttgatgatcggcctctggtgaagggtatcatcgcagccaagcaagctcatgaaaggctgatgggggaggtgtataattatgaggcccacggcgggcttattctttagggaggatctatctcgttgctcaagtgcatggcgcaaagcagttattggagtgcggattttcgttggcatattattcgccacgagttagcagacgaagagaccttcatgaacgtggccaaggccagagttaagcagatgttacgccctgctgcaggcctttctattatccaatagttggttgatctttggaaagagcctcggctgaggcccatactgaaagagatcgatggatatcgatatgccatgttgtttgctagccagaaccagatcacatccgatatgctattgcagcttgacgcagatatggaggataagttgattcatgggatcgctcaggagtagctcatccatgcacgccgacaagaacagaaattccgtcgagttaacgcagccgcttacgacggattcgaaggtcatccattcggaatgtattagtttgcaccagctccgcgtcacacctgtcttcatttgaataagatgttagcaattgtttttagctttgtcttgttgtggcagggcggcaagtgcttcagacatcattctgttttcaaattttatgctggagaacagcttcttaattcctttggaaataatagactgcgtcttaaaattcagatgtctggatatagatatgattgtaaaataacctatttaagtgtcatttagaacataagttttatgaatgttcttccattttcgtcatcgaacgaataagagtaaatacaccttttttaacattacaaataagttcttatacgttgtttatacaccgggaatcatttccattattttcgcgcaaaagtcacggatattcgtgaaagcgacataaactgcgaaatttgcggggagtgtcttgagtttgcctcgaggctagcgcatgcacatagacacacacatcatctcattgatgcttggtaataattgtcattagattgtttttatgcatagatgcactcgaaatcagccaattttagacaagtatcaaacggatgtgacttcagtacattaaaaacgtccgcaatgtgttattaagttgtctaagcgtcaatttgatttacaattgaatatatcctgccccagccagccaacagctcgatttacaattgaatatatcctgccggccggcccacgcgtgtcgaggaattctgatctggcccccatttggacgtgaatgtagacacgtcgaaataaagatttccgaattagaataatttgtttattgctttcgcctataaatacgacggatcgtaatttgtcgttttatcaaaatgtactttcattttataataacgctgcggacatctacatttttgaattgaaaaaaaattggtaattactctttctttttctccatattgaccatcatactcattgctgatccatgtagatttcccggacatgaagccatttacaattgaatatatcctgccgccgctgccgctttgcacccggtggagcttgcatgttggtttctacgcagaactgagccggttaggcagataatttccattgagaactgagccatgtgcaccttccccccaacacggtgagcgacggggcaacggagtgatccacatgggacttttaaacatcatccgtcggatggcgttgcgagagaagcagtcgatccgtgagatcagccgacgcaccgggcaggcgcgcaacacgatcgcaaagtatttgaacgcaggtacaatcgagccgacgttcacgcggaacgaccaagcaagcttggctgccatttttggggtgaggccgttcgcggccgaggggcgcagcccctggggggatgggaggcccgcgttagcgggccgggagggttcgagaagggggggcaccccccttcggcgtgcgcggtcacgcgcacagggcgcagccctggttaaaaacaaggtttataaatattggtttaaaagcaggttaaaagacaggttagcggtggccgaaaaacgggcggaaacccttgcaaatgctggattttctgcctgtggacagcccctcaaatgtcaataggtgcgcccctcatctgtcagcactctgcccctcaagtgtcaaggatcgcgcccctcatctgtcagtagtcgcgcccctcaagtgtcaataccgcagggcacttatccccaggcttgtccacatcatctgtgggaaactcgcgtaaaatcaggcgttttcgccgatttgcgaggctggccagctccacgtcgccggccgaaatcgagcctgcccctcatctgtcaacgccgcgccgggtgagtcggcccctcaagtgtcaacgtccgcccctcatctgtcagtgagggccaagttttccgcgaggtatccacaacgccggcggccgcggtgtctcgcacacggcttcgacggcgtttctggcgcgtttgcagggccatagacggccgccagcccagcggcgagggcaaccagcccggtgagcgtcggaaagggtcgacggatcttttccgctgcataaccctgcttcggggtcattatagcgattttttcggtatatccatcctttttcgcacgatatacaggattttgccaaagggttcgtgtagactttccttggtgtatccaacggcgtcagccgggcaggataggtgaagtaggcccacccgcgagcgggtgttccttcttcactgtcccttattcgcacctggcggtgctcaacgggaatcctgctctgcgaggctggccggctaccgccggcgtaacagatgagggcaagcggatggctgatgaaaccaagccaaccaggaagggcagcccacctatcaaggtgtactgccttccagacgaacgaagagcgattgaggaaaaggcggcggcggccggcatgagcctgtcggcctacctgctggccgtcggccagggctacaaaatcacgggcgtcgtggactatgagcacgtccgcgagctggcccgcatcaatggcgacctgggccgcctgggcggcctgctgaaactctggctcaccgacgacccgcgcacggcgcggttcggtgatgccacgatcctcgccctgctggcgaagatcgaagagaagcaggacgagcttggcaaggtcatgatgggcgtggtccgcccgagggcagagccatgacttttttagccgctaaaacggccggggggtgcgcgtgattgccaagcacgtccccatgcgctccatcaagaagagcgacttcgcggagctggtattcgtgcagggcaagattcggaataccaagtacgagaaggacggccagacggtctacgggaccgacttcattgccgataaggtggattatctggacaccaaggcaccaggcgggtcaaatcaggaataagggcacattgccccggcgtgagtcggggcaatcccgcaaggagggtgaatgaatcggacgtttgaccggaaggcatacaggcaagaactgatcgacgcggggttttccgccgaggatgccgaaaccatcgcaagccgcaccgtcatgcgtgcgccccgcgaaaccttccagtccgtcggctcgatggtccagcaagctacggccaagatcgagcgcgacagcgtgcaactggctccccctgccctgcccgcgccatcggccgccgtggagcgttcgcgtcgtctcgaacaggaggcggcaggtttggcgaagtcgatgaccatcgacacgcgaggaactatgacgaccaagaagcgaaaaaccgccggcgaggacctggcaaaacaggtcagcgaggccaagcaggccgcgttgctgaaacacacgaagcagcagatcaaggaaatgcagctttccttgttcgatattgcgccgtggccggacacgatgcgagcgatgccaaacgacacggcccgctctgccctgttcaccacgcgcaacaagaaaatcccgcgcgaggcgctgcaaaacaaggtcattttccacgtcaacaaggacgtgaagatcacctacaccggcgtcgagctgcgggccgacgatgacgaactggtgtggcagcaggtgttggagtacgcgaagcgcacccctatcggcgagccgatcaccttcacgttctacgagctttgccaggacctgggctggtcgatcaatggccggtattacacgaaggccgaggaatgcctgtcgcgcctacaggcgacggcgatgggcttcacgtccgaccgcgttgggcacctggaatcggtgtcgctgctgcaccgcttccgcgtcctggaccgtggcaagaaaacgtcccgttgccaggtcctgatcgacgaggaaatcgtcgtgctgtttgctggcgaccactacacgaaattcatatgggagaagtaccgcaagctgtcgccgacggcccgacggatgttcgactatttcagctcgcaccgggagccgtacccgctcaagctggaaaccttccgcctcatgtgcggatcggattccacccgcgtgaagaagtggcgcgagcaggtcggcgaagcctgcgaagagttgcgaggcagcggcctggtggaacacgcctgggtcaatgatgacctggtgcattgcaaacgctagggccttgtggggtcagttccggctgggggttcagcagccagcgctttactggcatttcaggaacaagcgggcactgctcgacgcacttgcttcgctcagtatcgctcgggacgcacggcgcgctctacgaactgccgataaacagaggattaaaattgacaattgtgattaaggctcagattcgacggcttggagcggccgacgtgcaggatttccgcgagatccgattgtcggccctgaagaaagctccagagatgttcgggtccgtttacgagcacgaggagaaaaagcccatggaggcgttcgctgaacggttgcgagatgccgtggcattcggcgcctacatcgacggcgagatcattgggctgtcggtcttcaaacaggaggacggccccaaggacgctcacaaggcgcatctgtccggcgttttcgtggagcccgaacagcgaggccgaggggtcgccggtatgctgctgcgggcgttgccggcgggtttattgctcgtgatgatcgtccgacagattccaacgggaatctggtggatgcgcatcttcatcctcggcgcacttaatatttcgctattctggagcttgttgtttatttcggtctaccgcctgccgggcggggtcgcggcgacggtaggcgctgtgcagccgctgatggtcgtgttcatctctgccgctctgctaggtagcccgatacgattgatggcggtcctgggggctatttgcggaactgcgggcgtggcgctgttggtgttgacaccaaacgcagcgctagatcctgtcggcgtcgcagcgggcctggcgggggcggtttccatggcgttcggaaccgtgctgacccgcaagtggcaacctcccgtgcctctgctcacctttaccgcctggcaactggcggccggaggacttctgctcgttccagtagctttagtgtttgatccgccaatcccgatgcctacaggaaccaatgttctcggcctggcgtggctcggcctgatcggagcgggtttaacctacttcctttggttccgggggatctcgcgactcgaacctacagttgtttccttactgggctttctcagcccccgagcgcttagtgggaatttgtaccccttatcgaaccgggagcacaggatgacgcctaacaattcattcaagccgacaccgcttcgcggcgcggcttaattcaggagttaaacatcatgagggaagcggtgatcgccgaagtatcgactcaactatcagaggtagttggcgtcatcgagcgccatctcgaaccgacgttgctggccgtacatttgtacggctccgcagtggatggcggcctgaagccacacagtgatattgatttgctggttacggtgaccgtaaggcttgatgaaacaacgcggcgagctttgatcaacgaccttttggaaacttcggcttcccctggagagagcgagattctccgcgctgtagaagtcaccattgttgtgcacgacgacatcattccgtggcgttatccagctaagcgcgaactgcaatttggagaatggcagcgcaatgacattcttgcaggtatcttcgagccagccacgatcgacattgatctggctatcttgctgacaaaagcaagagaacatagcgttgccttggtaggtccagcggcggaggaactctttgatccggttcctgaacaggatctatttgaggcgctaaatgaaaccttaacgctatggaactcgccgcccgactgggctggcgatgagcgaaatgtagtgcttacgttgtcccgcatttggtacagcgcagtaaccggcaaaatcgcgccgaaggatgtcgctgccgactgggcaatggagcgcctgccggcccagtatcagcccgtcatacttgaagctaggcaggcttatcttggacaagaagatcgcttggcctcgcgcgcagatcagttggaagaatttgttcactacgtgaaaggcgagatcaccaaggtagtcggcaaataatgtctaacaattcgttcaagccgacgccgcttcgcggcgcggcttaactcaagcgttagagagctggggaagactatgcgcgatctgttgaaggtggttctaagcctcgtcttgcgatggcatttcgatccattcccattccgcgctcaagatggcttcccctcggcagttcatcagggctaaatcaatctagccgacttgtccggtgaaatgggctgcactccaacagaaacaatcaaacaaacatacacagcgacttattcacacgagctcaaattacaacggtatatatcctgccagtcagcatcatcacaccaaaagttaggcccgaatagtttgaaattagaaagctcgcaattgaggtctacaggccaaattcgctcttagccgtacaatattactcaccggatcctaaccggtttaattaaggcgcgccatgcccgggcaagcggccgcacaagtttgtacaaaaaagcaggcttctaggatctgcttttacatgcgagacacatcttctaaagtaattttaataatagttactatattcaagatttcatatatcaaatactcaatattacttctaaaaaattaattagatataattaaaatattacttttttaattttaagtttaattgttgaatttgtgactattgatttattattctactatgtttaaattgttttatagatagtttaaagtaaatataagtaatgtagtagagtgttagagtgttaccctaaaccataaactataagatttatggtggactaattttcatatatttcttattgcttttaccttttcttggtatgtaagtccgtaactggaattactgtgggttgccatgacactctgtggtcttttggttcatgcatggatcttgcgcaagaaaaagacaaagaacaaagaaaaaagacaaaacagagagacaaaacgcaatcacacaaccaactcaaattagtcactggctgatcaagatcgccgcgtccatgtatgtctaaatgccatgcaaagcaacacgtgcttaacatgcactttaaatggctcacccatctcaacccacacacaaacacattgcctttttcttcatcatcaccacaaccacctgtatatattcattctcttccgccacctcaatttcttcacttcaacacacgtcaacctgcatatgcgtgtcatcccatgcccaaatctccatgcatgttccaaccaccttctctcttatataatacctataaatacctctaatatcactcacttctttcatcatccatccatccagagtactactactctactactataataccccaacccaactcatattcaatactactctaggatccacaaccaaaaatggcagcgaggctgcaagagcagaaaggaggtgagatggacacgaggattgcgatcataggcatgagcgccatacttccttgtggaaccacggtgagagagtcatgggagaccataagggctggcattgattgcctgtctgatcttcctgaggatcgtgttgatgtgactgcgtactttgacccagtcaagaccacaaaggacaaaatctactgcaagagaggaggtttcattcctgagtatgactttgatgcgcgtgagtttggtctcaacatgttccagatggaagattctgatgcgaatcagaccatctcacttctcaaggtcaaagaagcacttcaagatgctgggattgatgcacttggaaaggagaagaaaaacataggatgcgtgcttggcattggaggtggacagaagagttcacatgagttctacagcagactcaactatgtggttgtggagaaagtcttgagaaagatggggatgccagaggaagatgtcaaagtggctgtggagaagtacaaagcgaacttcccagaatggagacttgactctttccctggattccttgggaatgtcactgctggcagatgcaccaacacattcaacttggatggcatgaactgcgttgtggatgctgcatgtgcaagctccttgatagcagtcaaggttgcgattgatgaactgctctatggtgactgcgacatgatggtcactggtgcaacctgcacagacaactccattgggatgtacatggctttctcaaagacacctgtgttcagcacggacccaagtgtgagagcgtatgatgagaaaacgaaagggatgctcattggtgagggatcagccatgttggtgctcaaacgttatgcagatgcagtgagggatggtgatgagattcatgctgtgattcgtggttgtgcaagctcaagtgatggcaaagcagctggcatctacactcccacaatcagtggtcaagaggaagccttgagacgtgcatacaatcgtgcctgcgttgaccctgccactgtcactttggttgagggtcatgggactggcactccagttggagataggattgagttgactgcgttgaggaacttgtttgacaaagcgtatggtgaagggaacacagagaaagttgcagttggaagtatcaagtccagtattggtcatttgaaggctgttgctggtcttgctggaatgatcaaggtcatcatggctctcaaacacaagactttgcctggaacgatcaatgtggacaatccacccaatctctatgacaacactcccatcaatgagtcatccctctacatcaacacgatgaacagaccctggttccctccacctggtgttccgagacgtgctggaatatccagctttggctttggaggtgccaactaccatgcagtgttggaagaggctgaaccagagcacacgacagcgtacagactcaacaaacgtccacaaccggtgttgatgatggctgcaactcctgctgcgttgcagagcctttgtgaagctcagctgaaagagtttgaagctgcgatcaaggagaatgagacagtcaagaatactgcctacatcaagtgtgtcaagtttggagaacagttcaagttccctgggagcatacctgcgaccaatgcgagactgggattcttggtcaaagatgcggaggatgcgtgctccacgcttcgtgctatatgtgctcagtttgccaaagatgtgaccaaagaagcgtggaggcttccgagagaaggagtttctttccgtgccaaaggcattgccaccaatggtgctgttgctgcactcttctctggacaaggtgctcagtacacacacatgttcagtgaagttgcgatgaactggcctcagttcagacagtccattgctgcaatggacgctgcacagtccaaggttgctggaagtgacaaagactttgaaagagtctctcaagtcctgtacccaaggaaaccgtacgaacgtgagccagaacaagatcacaagaaaatctcactcacagcatacagccagccgtcaaccctggcatgtgctcttggtgcctttgagattttcaaggaagctggattcactccagactttgcagctggacacagcttgggtgagtttgctgcgctctatgcagctggttgtgttgacagagatgagttgtttgaacttgtttgcagaagggcaaggatcatgggaggcaaagatgcacctgccacacccaaaggttgcatggcagctgtcataggacccaacgcagagaacatcaaggttcaagctgccaacgtctggcttggaaactcaaactctccgtctcagactgtcattactgggtctgttgaagggattcaagctgaaagtgccagattgcagaaggaagggttcagagttgtgcctcttgcttgtgagtctgccttccattctccacagatggaaaatgccagctcagctttcaaagatgtcatatccaaggtttccttccgtacacccaaagcagaaacaaagctcttcagcaatgtttctggagagacctatccgacggatgccagagagatgctcactcaacacatgacctcatctgtgaagttcctgacccaagtgaggaacatgcaccaagctggtgcgagaatctttgttgagtttggaccgaaacaagttctcagcaaacttgtttctgaaaccctcaaagatgacccgtctgttgtcacagtgtctgtgaacccagcttctggcacggactctgacatacagttgagggatgctgcagttcagctggttgtggctggtgtcaatcttcaagggtttgacaagtgggatgctcctgatgccacgaggatgcaagccatcaagaaaaagagaaccacactcagactttcagctgccacctatgtcagtgacaagaccaagaaagtgagggatgctgccatgaacgacggaagatgtgtcacatacctcaagggtgctgcaccactcatcaaggctcctgaacctgtggttgacgaagctgccaagagggaggctgaaaggcttcagaaggagcttcaagacgctcagaggcagcttgacgacgccaaacgtgcagctgcagaagccaactccaaacttgctgctgccaaggaggaagccaagactgctgcagcttcagccaagcctgcagttgacactgctgttgtggagaaacatcgtgccatcctcaagtccatgctggctgagctggatggttatggaagtgttgatgcttcttcccttcagcaacagcaacagcaacagactgctccggcgcctgttaaagccgctgcccctgccgctcccgttgcaagtgctcctgctcccgccgtgtccaacgagttgcttgagaaagctgagacagttgtgatggaggttctcgctgccaagactggatacgaaacagacatgattgaggcggacatggagcttgagactgagttgggaattgacagcatcaagagggttgaaattctttctgaagtccaagctatgcttaacgttgaggcgaaagatgttgatgctctctctaggacgagaacagtgggtgaagttgtcaacgctatgaaggcagaaatcgctggttcttccgctccggcgccggcagctgccgcacctgcaccggctaaagcggctccagctgcagctgcaccagctgtttctaatgagctgctcgaaaaggcagaaactgttgtgatggaagtccttgctgccaaaactggctacgaaactgacatgatagaatcagacatggagcttgagacggagcttggaattgattccatcaagcgtgtggaaatcctcagtgaagtccaagccatgctcaatgtggaagctaaggatgtggatgctctctcaaggaccagaactgtcggtgaggttgtcaatgccatgaaggctgagatagctggaggctccgctcctgcgccggccgctgccgctcctggtcccgctgccgcggctccagctccagctgcagccgctccggccgtctcaaacgaactccttgaaaaagctgagaccgtcgtgatggaggtcttggcagctaaaaccggctatgagactgacatgattgagtctgacatggaattggagacagaacttgggatagacagcatcaaacgtgttgaaatcctcagtgaggtccaagctatgctgaacgtggaagcgaaggatgttgatgctctgtccagaacgaggaccgttggtgaggttgtggatgccatgaaggctgaaattgctggagggtctgcgcccgcgccagctgcagccgctcctgcacccgcagccgcggcacctgctccagctgcacctgcacctgccgtttcttcagaactcttggagaaggctgagacggttgtgatggaggttttggctgcaaagactggctatgagaccgacatgattgaatctgatatggaattggagacagagcttgggatcgattccatcaaaagagtggagatcctgagtgaagtccaagccatgctcaatgttgaagctaaggatgttgatgcactttcaagaacaaggacagtgggtgaggttgtggatgccatgaaggcggagattgctggagggagcgcgcctgcgccagctgccgcggcacctgcaccggcagccgcagctccagctccagctgcaccagcaccggccgcgcccgcgccagctgtttcatccgaactcctggaaaaggccgagacggttgtgatggaggtgctcgcagctaagactggttacgagaccgacatgattgaaagtgacatggagcttgaaaccgagttgggaatagatagcatcaaacgtgttgaaatcttgtctgaggtccaagctatgttgaacgtggaggcaaaagatgtcgatgcgctttcaagaaccagaacagtcggtgaggtcgtggacgccatgaaggctgaaattgccggaagctctgctagtgcgccagctgcagccgcacctgcacctgctgccgcggcacctgctccagctgcagccgctcctgccgtcagcaatgagttgctggagaaagccgaaacagttgtgatggaagtccttgctgcaaaaactggttacgaaacggacatgattgagtcagacatggaattggagaccgaacttggaatagattccatcaagagagtggagatcctctctgaggtgcaagccatgctcaacgttgaggctaaagatgttgatgcactcagtaggacaagaactgtgggggaagttgtcgatgcgatgaaggctgagattgctggaggctctgctcctgcgccggcagctgccgcacctgcacccgcagccgcggcaccagctgtcagcaacgaattgcttgagaaggctgaaacagttgtcatggaagtgctggctgcaaaaaccggctatgagactgacatgattgagtctgacatggaacttgagacggaattgggcattgacagcatcaagcgtgttgagatcctcagtgaagtccaagcaatgctcaatgtggaggctaaggatgtggatgccctctcaaggaccagaacagttggtgaggtcgttgatgcgatgaaggcggagatcgctggaagttccgcgcctgcgccagctgcagccgctcctgcacccgcagccgcggcaccggctccagctgcagccgcaccggccgtctcctcagaactcctggaaaaggctgagacagttgtgatggaagtccttgctgcgaaaactggctatgagaccgacatgattgaatctgacatggaactggagaccgagcttggaattgactccatcaaacgtgttgaaatcctctctgaggttcaagcgatgttgaatgtggaggccaaagatgttgatgctctttccagaacaaggacggtgggagaggtggttgatgccatgaaggctgagatagctgggggttctgctcctgcgccagctgcagccgctcctgctcccgctgccgcggcaccagctgtcagcaacgaactccttgaaaaagctgaaactgttgtgatggaggttttggctgcaaagactggatacgagactgacatgatagagtcagacatggagttggaaacagagcttgggattgatagcatcaagcgtgtggaaatcctttctgaggttcaagccatgctgaacgttgaggccaaagatgtcgatgctttgtcaaggaccagaacggttggagaagtggtcgatgccatgaaggctgagatagctggtggatcagcccctgctccggctgcagccgctcctgcaagtgccggtgctgcaccagctgtgaagattgattcagttcatggtgctgactgtgacgatttgtcactgatgcacgcaaaggtggttgacatcagaaggccagatgaactgattctggaaagaccggagaaccgtccagttcttgtcgttgacgatggctcagagttgacacttgctcttgtgagggtgttgggagcctgtgcagttgtcttgacctttgagggattgcagttggctcagagagctggtgcagctgccattcgtcatgttctggctaaggacctttcagcagaatcagctgagaaggccatcaaagaggctgagcaaagatttggagcgttgggaggcttcataagccagcaagcagaaaggtttgaaccagctgagatactgggtttcacactcatgtgtgcgaagtttgccaaagcctctctctgcactgctgtggctggaggtcgtcctgccttcatcggtgtggctaggcttgacggcagacttggattcacctctcaaggcacttctgacgcactcaagagagcacagcgtggagcgatctttggactctgcaagacaatagggttggagtggtcagaatctgatgtgttcagccgtggtgtggacattgctcaagggatgcacccagaagatgctgcagttgccatagttagggagatggcgtgtgctgacatcagaatcagagaggttgggattggagcaaaccagcaaagatgcacaatcagagctgccaagttggagactgggaaccctcagagacagatagcgaaagacgatgtgcttctggtttctggaggtgctcgtgggatcacacctctttgcatccgtgagatcacgcgtcagattgctggaggcaagtacattctgttgggtcgtagcaaagtttctgcgtctgaaccagcatggtgtgctggcatcactgatgagaaggctgtgcagaaagctgccacccaagagttgaagagggccttcagtgctggtgaaggacccaaacccactccaagggctgtcacgaaacttgtgggatctgttcttggtgctcgtgaagtgagaagctccattgctgccattgaagctctgggtggcaaagcgatctacagctcttgtgatgtgaactctgctgcagatgttgccaaagcagttagggatgcagagtcccagcttggtgccagagttagtggaatcgttcacgcttctggtgtgctccgtgatcgtctcatagagaagaaactccctgacgagtttgatgctgtctttgggaccaaagtcactgggttggagaatcttctggctgcagttgatcgtgccaacctcaaacacatggttctcttcagctcccttgctggtttccacggcaatgttggtcagtctgactatgcgatggcaaacgaagctctcaacaagatgggtttggaacttgcgaaggatgtcagtgtcaagtccatctgctttggtccctgggatggtgggatggtgacacctcaactcaagaaacagtttcaagaaatgggagttcagatcattcctcgtgaaggaggtgctgatacagttgcgaggattgtgttgggatcaagtcctgctgagatccttgttggaaactggaggacaccatccaagaaagttggaagtgacacgatcaccctgcatagaaagatcagtgccaagtccaatcccttcttggaggatcatgtcatacaaggcagaagggtgttgccaatgacccttgctattgggagccttgctgagacctgccttggactcttccctggctactctctctgggccatagatgacgcacagctcttcaaaggtgtcactgttgatggagacgtcaactgtgaagtgaccctcacaccgtccactgctccgagtgggagggtgaatgtccaagcgacgctcaagacgttctcaagtggaaaacttgttccagcctacagagctgtcatagtgttgtccaaccaaggtgctccacctgccaatgcaaccatgcagcctccgagccttgatgcagatcctgctttgcaagggtcagtctatgatggcaagactctctttcatggtcctgcgttcagaggcattgatgacgttctcagctgcaccaagagccagcttgttgccaagtgttctgctgttcctggatcagatgcagccagaggagagtttgcaactgacactgatgcacatgatccctttgtcaatgatcttgcctttcaagcaatgttggtctgggtgaggagaacgctgggacaagctgcactcccgaactccattcagaggatagtccaacacagaccggtcccacaagacaaacccttctacatcaccctcagatccaatcagagtggtggacatagccagcacaaacatgcacttcagttccacaacgaacaaggtgatctcttcattgatgttcaagcctctgtcattgcgacagactcacttgcgttctgagtagttagcttaatcacttaggtcacctcgagtatcaaaatctatttagaaatacacaatattttgttgcaggcttgctggagaatcgatctgctatcataaaaattacaaaaaaattttatttgcctcaattattttaggattggtattaaggacgcttaaattatttgtcgggtcactacgcatcattgtgattgagaagatcagcgatacgaaatattcgtagtactatcgataatttatttgaaaattcataagaaaagcaaacgttacatgaattgatgaaacaatacaaagacagataaagccacgcacatttaggatattggccgagattactgaatattgagtaagatcacggaatttctgacaggagcatgtcttcaattcagcccaaatggcagttgaaatactcaaaccgccccatatgcaggagcggatcattcattgtttgtttggttgcctttgccaacatgggagtccaaggttggcgcgccgaattcgcggccgcttaattaagatgagtgatactcaggactcaggactcactctgctgatcactagtgctagcctcgaggtcgacacaactttgtatacaaaagttgtctaggatctgcttttacatgcgagacacatcttctaaagtaattttaataatagttactatattcaagatttcatatatcaaatactcaatattacttctaaaaaattaattagatataattaaaatattacttttttaattttaagtttaattgttgaatttgtgactattgatttattattctactatgtttaaattgttttatagatagtttaaagtaaatataagtaatgtagtagagtgttagagtgttaccctaaaccataaactataagatttatggtggactaattttcatatatttcttattgcttttaccttttcttggtatgtaagtccgtaactggaattactgtgggttgccatgacactctgtggtcttttggttcatgcatggatcttgcgcaagaaaaagacaaagaacaaagaaaaaagacaaaacagagagacaaaacgcaatcacacaaccaactcaaattagtcactggctgatcaagatcgccgcgtccatgtatgtctaaatgccatgcaaagcaacacgtgcttaacatgcactttaaatggctcacccatctcaacccacacacaaacacattgcctttttcttcatcatcaccacaaccacctgtatatattcattctcttccgccacctcaatttcttcacttcaacacacgtcaacctgcatatgcgtgtcatcccatgcccaaatctccatgcatgttccaaccaccttctctcttatataatacctataaatacctctaatatcactcacttctttcatcatccatccatccagagtactactactctactactataataccccaacccaactcatattcaatactactctaggatccacaaccaaaaatggctgcaaggaacgtgagtgcggctcatgagatgcatgacgagaagaggatagctgttgtgggcatggctgttcagtatgctggatgcaaaacgaaagacgagttctgggaagttctcatgaatggaaaagttgagagcaaagtgatcagcgacaaacgtcttggttcaaattaccgtgctgaacactacaaagctgaaaggagcaagtatgctgacaccttctgcaatgagacatatggaactcttgatgagaacgaaatagacaatgagcatgaactccttttgaaccttgccaaacaagccttggctgaaacatctgtcaaagattcaacaagatgtggcatagtttctggatgcctcagcttcccgatggacaacctccaaggtgaactcttgaatgtgtaccagaaccatgttgagaagaaacttggtgccagagttttcaaagatgcctctcactggtcagaaagagaacagtccaacaaaccagaggctggtgacagaagaatcttcatggaccctgcttcctttgttgctgaggaactcaatcttggcgctctccactactctgttgatgctgcctgtgccactgcgctctatgtgctcagactggcgcaagatcacttggtctctggtgcagctgatgtgatgctttgtggtgcaacatgcctgccggagccgtttttcatactctctgggttctcaaccttccaagccatgcctgttggaacgggtcagaatgtgtccatgccgctgcacaaagattctcaaggattgacccctggtgaaggaggttccatcatggtcctcaaacgtttggatgacgcaatcagagatggagatcacatctatggaacacttttgggagccaatgtcagcaacagtggcactggtctgccacttaaaccccttttgccgtcagagaaaaagtgcctcatggacacctacacacgtatcaatgtgcatccccacaagattcagtatgttgaatgccatgcaactgggactccacaaggtgatcgtgtggaaattgatgctgtgaaggcttgctttgaaggcaaagtcccacgttttggaaccacaaaagggaactttggacacacattggtggcagctgggtttgctggcatgtgcaaagtgcttctctccatgaagcacgggatcattccacccactccgggaatagatgacgaaacgaagatggaccctctggttgtctctggtgaggccattccctggccagaaacgaatggagaaccgaagcgtgctggtctctcagcgtttggatttggtgggaccaatgctcatgctgtctttgaggaacatgacccaagcaatgctgcatgcactggccatgactccatttctgctctctctgcacgttgtggtggtgagtcaaacatgagaatagcaatcactgggatggatgccacttttggtgctttgaaaggattggatgcttttgaaagggccatctacactggtgctcatggtgctataccactcccagaaaagagatggagattcctggggaaagacaaggacttccttgatctttgtggagtcaaagcaacaccgcatggctgttacattgaagatgttgaagttgatttccagaggctgaggactccaatgactcctgaagatatgctcttgcctcaacagcttctggctgtcaccacaattgatagggccatattggactctggcatgaagaaaggtggaaatgtggctgtctttgtggggttggggaccgatcttgaactctaccgtcaccgtgcaagggttgctctcaaggagagagtgaggcctgaagccagcaagaaactcaatgacatgatgcagtacatcaatgattgtgggacaagcacttcttacaccagctacataggcaacttggttgcaacaagggtcagttcacaatggggcttcacgggaccttccttcacaatcacagaaggcaacaattctgtgtacagatgtgctgaacttggcaaatacctcttggaaacgggagaggttgatggggttgtggttgcgggtgttgatctctgtgggagtgctgagaacctttacgtcaagtcaaggcgtttcaaggtgtctacatctgacaccccgagagccagctttgatgcagctgctgatggttactttgttggagagggctgtggtgcatttgtgctcaagcgtgagacaagctgcaccaaggatgacagaatctatgcttgcatggatgccatagttcctggaaatgttccatctgcatgtttgagagaggcattggatcaagccagagtcaagcctggagacatcgagatgttggagctttctgctgattcagcgaggcatttgaaggacccgtctgttctcccaaaggaactcactgctgaggaagagattggcggacttcagacgattcttcgtgacgatgacaagctcccaaggaatgttgcaactggaagtgtcaaggccactgttggtgacactggttatgcttctggtgctgccagtttgattaaggctgcgctttgcatctacaaccgttacctgcccagcaatggagatgactgggatgaacctgcacctgaagcaccctgggacagcacactctttgcgtgccagacctcaagagcttggttgaagaaccctggtgagagacgttatgcggctgtttccggagtcagtgaaaccagaagttgctacagtgtgctgctttctgaagcagagggacactacgagagagagaacagaatcagtttggatgaggaagcacccaagctcattgtgttgagagcagactcccatgaagagattcttggaagattggacaagataagggaaaggttcttgcagcccacgggtgctgcacccagagagtctgaattgaaggcgcaagcccgtaggatctttcttgaactccttggtgagacccttgcccaagatgcagcttcatctggaagtcagaagccccttgctctcagcttggtctccactccatccaagctccagagagaggtggaacttgcggcaaaaggcattccgagatgtctcaagatgagacgtgattggagttcccctgctggaagcagatatgcgcctgagcctttggccagtgacagagttgccttcatgtatggagaaggaaggagcccttactatggcatcacacaagacattcataggatttggcctgaacttcatgaggtcatcaatgagaaaacaaaccgtctctgggctgaaggtgacagatgggtcatgccaagggccagcttcaagagtgagcttgagtcacaacagcaagagtttgacagaaacatgattgaaatgttccgtcttggaatcctcacctcaattgccttcacaaacctggcgagagatgttctcaacatcacgcccaaagcagcctttggactcagtttgggagagatttccatgatctttgctttctccaagaaaaacggtttgataagcgatcagttgacaaaggatttgagagagtcagatgtctggaacaaagctctggctgttgagttcaatgcgctcagagaagcctggggcattccacagtctgtcccaaaagatgagttctggcaaggttacatagtgaggggaacgaaacaagacatagaagcagccatagcaccagactcaaagtatgtgaggttgaccatcatcaatgatgccaacactgctctcatcagtggaaagcctgatgcatgcaaagctgcgattgctcgtcttggtggcaacatccctgcgcttccagtcactcaaggcatgtgtgggcattgcccagaggtgggaccttacaccaaggacatcgcaaagatccacgccaaccttgagttccctgtggttgatggtcttgatctctggactaccataaaccagaagaggcttgtgccaagagccacgggtgccaaagatgaatgggctccttcatcctttggggagtatgctggacagctctatgagaaacaagccaacttccctcagatagttgaaaccatctacaagcagaactatgatgtgtttgttgaagttgggccaaacaatcacagaagcacagcagtgagaaccacgcttggaccacagagaaaccaccttgctggtgccatagacaagcagaacgaggatgcttggacgacaatagtcaagctcgtggcttcattgaaggctcaccttgttcctggagtgaccatcagtccgctctaccactccaagctcgttgcagaggctgaggcttgttatgctgcgctctgtaaaggtgagaaacccaagaaaaacaagtttgtgagaaagattcagttgaatggcagattcaacagcaaggcagaccccatctcctcagcagaccttgcatccttcccacctgcggaccctgcgattgaagctgccatctcttcaaggatcatgaagcctgtggctccgaaattctatgcgcgtctcaacattgatgagcaagatgagaccagagatccgatcttgaacaaggacaatgcgccttccagctccagctcttccagcagttcctcttccagcagttcatctccgtctcctgctccttcagctccagttcagaagaaagctgccccagctgcggagacaaaagctgttgccagtgctgatgcacttcgtagtgccctgcttgatcttgactccatgcttgcgctcagctctgcaagtgcttctggcaaccttgttgagactgcgccatctgatgccagtgtcattgtccctccgtgcaacattgctgatcttggcagcagagctttcatgaaaacttatggtgtttctgcgcctctgtacaccggtgcaatggccaagggaattgcctctgcggacttggtgatcgcagctggaaggcaaggaatccttgcgtcatttggtgctggaggccttccaatgcaagttgtgcgtgagtccattgaaaagattcaagctgccctgcccaatggaccatatgctgtcaacctcatccattctccttttgacagcaaccttgagaagggaaatgttgatctcttcttggaaaagggtgtcacttttgttgaggcttcagccttcatgacgttgacaccgcaagttgtcagatacagagcggctgggttgacgaggaatgcagatgggtcagtcaacataaggaacagaatcattgggaaagtctccagaactgagctggctgaaatgttcatgcgtcctgcacctgagcatcttttgcagaagctcattgcttctggggagatcaatcaagaacaagctgagttggccagacgtgttcctgtggctgatgacattgcggttgaagctgattctggtggacacactgacaaccgtccaatccatgtcattctgcctctgattatcaacctgagggataggcttcacagagagtgtggatacccagcaaacctgagggttcgtgttggtgctgggggtggcattgggtgtccccaagctgcgctggcaactttcaacatgggtgcctctttcattgtcactggaacagtgaaccaagttgccaaacaatctgggacgtgtgacaatgtgaggaaacagcttgcgaaagcaacttactcagatgtttgcatggcaccggcagctgacatgtttgaggaaggtgtgaaacttcaagttttgaagaaaggaacaatgttcccttcaagagccaacaaactctatgagttgttctgcaagtatgattcttttgagtccatgcctccagcagagcttgcgagggttgagaaaagaatcttcagtcgtgcattggaagaggtctgggatgagaccaagaacttctacatcaaccgtctccacaacccagagaagatacagagggctgagagggaccccaaactgaagatgtcactgtgtttcagatggtatctgtccctggcttcaaggtgggccaacactggagcttctgacagagtcatggactaccaagtttggtgtggtcctgccattggttcattcaatgatttcatcaaaggaacttaccttgatccggcagtggcaaatgagtacccgtgtgttgtgcagatcaacaaacagattcttagaggagcgtgcttcttgaggcgtcttgaaatactgagaaatgcaaggctttcagatggtgcagctgcacttgtggcgagcattgatgacacatatgtccctgctgagaagctgtgagtagttagcttaatcacttaggtcacctcgagtatcaaaatctatttagaaatacacaatattttgttgcaggcttgctggagaatcgatctgctatcataaaaattacaaaaaaattttatttgcctcaattattttaggattggtattaaggacgcttaaattatttgtcgggtcactacgcatcattgtgattgagaagatcagcgatacgaaatattcgtagtactatcgataatttatttgaaaattcataagaaaagcaaacgttacatgaattgatgaaacaatacaaagacagataaagccacgcacatttaggatattggccgagattactgaatattgagtaagatcacggaatttctgacaggagcatgtcttcaattcagcccaaatggcagttgaaatactcaaaccgccccatatgcaggagcggatcattcattgtttgtttggttgcctttgccaacatgggagtccaaggttggcgcgccgaattcgcggccgcttaattaatctgacctgaccactagacctgagtgagtacagatgtgctactagtgctagcctcgaggtcgaccaacttttctatacaaagttgtctaggatctgcttttacatgcgagacacatcttctaaagtaattttaataatagttactatattcaagatttcatatatcaaatactcaatattacttctaaaaaattaattagatataattaaaatattacttttttaattttaagtttaattgttgaatttgtgactattgatttattattctactatgtttaaattgttttatagatagtttaaagtaaatataagtaatgtagtagagtgttagagtgttaccctaaaccataaactataagatttatggtggactaattttcatatatttcttattgcttttaccttttcttggtatgtaagtccgtaactggaattactgtgggttgccatgacactctgtggtcttttggttcatgcatggatcttgcgcaagaaaaagacaaagaacaaagaaaaaagacaaaacagagagacaaaacgcaatcacacaaccaactcaaattagtcactggctgatcaagatcgccgcgtccatgtatgtctaaatgccatgcaaagcaacacgtgcttaacatgcactttaaatggctcacccatctcaacccacacacaaacacattgcctttttcttcatcatcaccacaaccacctgtatatattcattctcttccgccacctcaatttcttcacttcaacacacgtcaacctgcatatgcgtgtcatcccatgcccaaatctccatgcatgttccaaccaccttctctcttatataatacctataaatacctctaatatcactcacttctttcatcatccatccatccagagtactactactctactactataataccccaacccaactcatattcaatactactctaggatccacaaccaaaaatggcgcttcgtgtcaagaccaacaagaagccatgttgggagatgaccaaggaggaactgacctctggcaaaactgaggtgttcaactatgaggaactcctggagtttgcagagggtgacatagctaaggtttttggtccggagtttgctgtcatagacaagtaccccagaagggtgaggctgcctgctcgtgaatacctgcttgtgacaagggtcacactcatggatgccgaggtcaacaactacagagttggtgccagaatggtcactgagtatgatcttccagtgaatggcgaattgtctgagggaggtgattgtccctgggcagttctggttgagagtggacagtgcgatttgatgctgatatcatacatgggaattgatttccagaaccaaggtgacagagtttaccgtctgctcaacaccacgttgacattctatggggttgcccatgagggagagacccttgagtatgacatcagagtgaccggttttgccaaacgtttggatggtggcatctccatgttcttctttgagtatgactgctatgtcaatgggaggcttctcattgagatgagagatggctgtgctggcttcttcacaaatgaggagcttgatgcgggaaagggtgtggtgttcacaagaggggatttggctgccagagctaagattccaaagcaagatgtttctccctatgctgtcgctccctgccttcacaaaacaaaactcaacgaaaaggagatgcagaccttggttgacaaagattgggcttccgtttttggctcaaagaatggcatgccggagatcaactacaaactctgcgcacgtaagatgctcatgattgatagagtcaccagcattgaccataagggaggtgtgtacggtttgggtcagttggttggtgagaaaatcttggagagggaccattggtacttcccatgccattttgttaaggatcaagtcatggctggatctcttgtcagcgacggttgttcacaaatgctcaagatgtacatgatctggctcggtttgcaccttaccaccggaccatttgacttcagacccgtcaacggacacccgaacaaagttaggtgtaggggtcagatatctcctcataagggaaagttggtctacgtcatggagatcaaagagatgggattcgacgaggataacgatccgtacgccattgctgacgtcaacatcattgacgttgatttcgaaaagggtcaagatttcagccttgatagaatcagcgactacggaaagggggatcttaacaaaaagatcgtcgtggacttcaagggcattgctctcaagatgcagaagagatccacgaacaagaacccctccaaagttcagcccgtttttgctaacggtgcagccactgtgggaccggaagcgtccaaggccagctctggtgccagtgctagtgcttctgctgcccctgcgaagcctgctttctcagcagatgttcttgcgccaaagccagttgcacttcctgaacatatcctcaagggtgacgctctcgctccgaaagaaatgtcctggcatcccatgtcaaaacttcctggcaacccgacgccgttcttctcccctagttcttaccctccgagggcaatttgcttcatccctttccctggcaacccacttgacaacaattgcaaagctggagaaatgcctctgaactggtacaacatgtcagagttcatgtgtggaaaagttagcaactgcttgggaccagagttcgcaagatttgataagtcaaatacgagcagaagccctgcttttgatttggctcttgtgactagagttgttgaagtcacaaacatggaacatggcaagttcctgaatgttgattgcaatcccagcaaaggcacaatggtgggggagtttgactgtcctcaagatgcgtggttctttgatggttcttgcaatgatgggcacatgccttattccatcatcatggaaatcggacttcagacatccggtgttctcaccagtgtgttgaaagcaccactgacgatggacaaagatgacattctctttaggaaccttgatgcaagtgctgaaatggtgaggccagatgtggatgtgagggggaaaaccataaggaatgtgaccaagtgcactggatatgcaatgttgggaaagatggggattcacagattcacgtttgagttgtctgttgatggcgtggttttctacaaaggaagcacttcctttggatggttcactccagaggtgtttgctcagcaagctggacttgacaatgggaaaaagacggagccttggtgcaaaactaacaacacgagtgtgagaagagttgaaatcgcatcagccaaaggcaaagaacagctgactgagaaacttccagatgcaactaatgctcaagttctcagaaggtcagaacagtgtgagtatttggattacctcaacattgctcctgattctgggctgcatgggaaaggatatgcgcatggacacaaagatgttaacccacaagactggttcttctcttgtcacttttggtttgatcctgtgatgcctggatctttgggaattgagtcaatgttccagctcattgaggcatttgcggtggaccagaacataccgggagaatacaatgtgagcaatccgacctttgcccatgcccctggaaaaacggcgtggaagtaccgtggtcaattgacaccaaagaaccgtgcgatggactgtgaggtgcacatagtttcaatcacagcctctcctgaaaatggaggctacgttgacatagtggcagatggagcactttgggttgatggtctccgtgtgtatgaagccaaagaactcagagttcgtgttgtcagtgcaaaacctcaagccattccggatgttcaacaacagccacccagcgcaaaagcggaccctgggaaaactggagttgcactcagtccgactcagttgagagatgtcctgcttgaagtggacaatccattgtatcttggtgttgaaaactccaatttggtgcagtttgaatccaaacctgcaacttcttcaaggattgtcagtatcaaaccatgctccataagtgatcttggtgacaagtccttcatggaaacgtacaatgtgtcagcacctctgtacactggagcaatggccaagggaattgcgtctgcggaccttgtcattgctgctgggaagaggaagatattgggttcttttggagcgggtgggcttccaatgcaccatgtgagggcagctttggagaagatacaagcggctctgcctcaaggaccatatgctgtgaacctcattcattcaccttttgacagcaacttggaaaaggggaatgttgatctcttcctcgaaaagggcgttactgtggtggaggcttctgcattcatgaccctcactccccaagttgttcgttaccgtgcagccggactctcaaggaacgctgatgggagtgtcaacatcagaaaccgtatcattggaaaagtgtccagaacagaactcgccgaaatgttcatcagaccggctccggaacacctccttgagaaactcatagcttctggtgagataacacaagaacaagccgaacttgcccgtcgtgttcctgtcgcagacgacatcgctgttgaagctgattctggtggtcacactgacaaccgtcccatccacgtcatcttgcctttgatcatcaaccttaggaacagactgcacagagagtgtggttatcctgcgcaccttagagtcagagttggagctggaggcggtgttggctgcccacaagctgctgcggctgccctcacaatgggagctgccttcatagtgactgggactgtcaatcaagttgctaaacagtccgggacatgtgacaacgtgagaaaacaactcagtcaagccacctacagtgacatttgcatggctccagcagctgatatgtttgaggaaggtgtgaaactccaagttctcaagaagggaacaatgttcccatcaagagctaacaaattgtacgaactcttttgcaagtacgactctttcgattcaatgcctcctgctgaacttgaaaggatcgagaagaggatcttcaagagggcacttcaagaggtctgggaagagaccaaggacttttacatcaatggtttgaagaatccagagaagatacagagagcggaacatgaccccaaactcaagatgtctttgtgtttcagatggtatcttggtcttgcatcacgttgggccaacatgggtgctcctgatcgtgtcatggactatcaagtctggtgtggtccagccattggagccttcaatgacttcatcaaaggaacatatcttgatcctgctgtctctaatgagtacccatgtgttgtccagatcaaccttcagattttgcgtggtgcatgttacctgaggcgtcttaatgctctgagaaatgatccgaggattgatcttgagactgaagatgctgcctttgtctatgagccaacgaatgcgctttgagtagttagcttaatcacttaggtcacctcgagtatcaaaatctatttagaaatacacaatattttgttgcaggcttgctggagaatcgatctgctatcataaaaattacaaaaaaattttatttgcctcaattattttaggattggtattaaggacgcttaaattatttgtcgggtcactacgcatcattgtgattgagaagatcagcgatacgaaatattcgtagtactatcgataatttatttgaaaattcataagaaaagcaaacgttacatgaattgatgaaacaatacaaagacagataaagccacgcacatttaggatattggccgagattactgaatattgagtaagatcacggaatttctgacaggagcatgtcttcaattcagcccaaatggcagttgaaatactcaaaccgccccatatgcaggagcggatcattcattgtttgtttggttgcctttgccaacatgggagtccaaggttggcgcgccgaattcgcggccgcttaattaatcacgagtggatgactgtcacgactgactcatgactgactactagtgctagcctcgaggtcgacacaactttgtataataaagttgtctagtctgcttttacatgcgagacacatcttctaaagtaattttaataatagttactatattcaagatttcatatatcaaatactcaatattacttctaaaaaattaattagatataattaaaatattacttttttaattttaagtttaattgttgaatttgtgactattgatttattattctactatgtttaaattgttttatagatagtttaaagtaaatataagtaatgtagtagagtgttagagtgttaccctaaaccataaactataagatttatggtggactaattttcatatatttcttattgcttttaccttttcttggtatgtaagtccgtaactggaattactgtgggttgccatgacactctgtggtcttttggttcatgcatggatcttgcgcaagaaaaagacaaagaacaaagaaaaaagacaaaacagagagacaaaacgcaatcacacaaccaactcaaattagtcactggctgatcaagatcgccgcgtccatgtatgtctaaatgccatgcaaagcaacacgtgcttaacatgcactttaaatggctcacccatctcaacccacacacaaacacattgcctttttcttcatcatcaccacaaccacctgtatatattcattctcttccgccacctcaatttcttcacttcaacacacgtcaacctgcatatgcgtgtcatcccatgcccaaatctccatgcatgttccaaccaccttctctcttatataatacctataaatacctctaatatcactcacttctttcatcatccatccatccagagtactactactctactactataataccccaacccaactcatattcaatactactctaggatccacaaccaaaaatgcttcagcacacttggcttccgaagcctcccaatctgaccctcttgtcagatgaggttcatctctggaggattcctcttgaccagcctgagtcacaacttcaagaccttgctgccaccctgagcagtgatgaattggcgagggcaaacagattctactttccagaacacagaaggcgtttcactgctgggagaggcatcctcagatccatcttgggtggatacttgggagtggaaccgggtcaagtcaagtttgattatgagtcccgtgggaaaccgatccttggtgacagatttgctgagagtggactcctgttcaacttgtctcacagccagaaccttgccttgtgtgctgtcaactacacgcgtcaaataggcattgatcttgaatatctgcgtccaacatctgacttggagtctcttgcaaagaggttctttctcccaagagaatatgaactcttgaggtcactccctgatgagcagaaacagaagattttctttcgttactggacttgcaaagaggcttatctcaaagcaacgggagatggaatagccaaacttgaagagatcgagatagcactcaccccaacagaacctgccaagctccaaacagctcctgcgtggtctctgttggagcttgtgccagatgacaattgtgttgcagctgtggctgttgcgggttttggttggcagcccaagttctggcattactgagtagttagcttaatcacttaggtcacctcgagtatcaaaatctatttagaaatacacaatattttgttgcaggcttgctggagaatcgatctgctatcataaaaattacaaaaaaattttatttgcctcaattattttaggattggtattaaggacgcttaaattatttgtcgggtcactacgcatcattgtgattgagaagatcagcgatacgaaatattcgtagtactatcgataatttatttgaaaattcataagaaaagcaaacgttacatgaattgatgaaacaatacaaagacagataaagccacgcacatttaggatattggccgagattactgaatattgagtaagatcacggaatttctgacaggagcatgtcttcaattcagcccaaatggcagttgaaatactcaaaccgccccatatgcaggagcggatcattcattgtttgtttggttgcctttgccaacatgggagtccaaggttggcgcgccgaattcgcggccgcttaattaactactgtcactgaggccgtagacgagtacggactgatctaactagtgctagcctcgaggtcgacacccagcttt

SEQ ID NO: 44 - DNA, 47165 bp, Artificial sequence
  plasmid pDAB9323
gtacaaaaaagcaggcttctagacctagctaggtggagtcatcacgcagactatctcagcatgtgcgtagcacgcggccgcctcccagtatcattatagtgaaagttttggctctctcgccggtggttttttacctctatttaaaggggttttccacctaaaaattctggtatcattctcactttacttgttactttaatttctcataatctttggttgaaattatcacgcttccgcacacgatatccctacaaatttattatttgttaaacattttcaaaccgcataaaattttatgaagtcccgtctatctttaatgtagtctaacattttcatattgaaatatataatttacttaattttagcgttggtagaaagcataatgatttattcttattcttcttcatataaatgtttaatatacaatataaacaaattctttaccttaagaaggatttcccattttatattttaaaaatatatttatcaaatatttttcaaccacgtaaatctcataataataagttgtttcaaaagtaataaaatttaactccataatttttttattcgactgatcttaaagcaacacccagtgacacaactagccatttttttctttgaataaaaaaatccaattatcattgtattttttttatacaatgaaaatttcaccaaacaatgatttgtggtatttctgaagcaagtcatgttatgcaaaattctataattcccatttgacactacggaagtaactgaagatctgcttttacatgcgagacacatcttctaaagtaattttaataatagttactatattcaagatttcatatatcaaatactcaatattacttctaaaaaattaattagatataattaaaatattacttttttaattttaagtttaattgttgaatttgtgactattgatttattattctactatgtttaaattgttttatagatagtttaaagtaaatataagtaatgtagtagagtgttagagtgttaccctaaaccataaactataagatttatggtggactaattttcatatatttcttattgcttttaccttttcttggtatgtaagtccgtaactggaattactgtgggttgccatgacactctgtggtcttttggttcatgcatggatcttgcgcaagaaaaagacaaagaacaaagaaaaaagacaaaacagagagacaaaacgcaatcacacaaccaactcaaattagtcactggctgatcaagatcgccgcgtccatgtatgtctaaatgccatgcaaagcaacacgtgcttaacatgcactttaaatggctcacccatctcaacccacacacaaacacattgcctttttcttcatcatcaccacaaccacctgtatatattcattctcttccgccacctcaatttcttcacttcaacacacgtcaacctgcatatgcgtgtcatcccatgcccaaatctccatgcatgttccaaccaccttctctcttatataatacctataaatacctctaatatcactcacttctttcatcatccatccatccagagtactactactctactactataataccccaacccaactcatattcaatactactctaggatccacaaccaaaaatggcggcccgtctgcaggagcaaaagggaggcgagatggatacccgcattgccatcatcggcatgtcggccatcctcccctgcggcacgaccgtgcgcgagtcgtgggagaccatccgcgccggcatcgactgcctgtcggatctccccgaggaccgcgtcgacgtgacggcgtactttgaccccgtcaagaccaccaaggacaagatctactgcaagcgcggtggcttcattcccgagtacgactttgacgcccgcgagttcggactcaacatgttccagatggaggactcggacgcaaaccagaccatctcgcttctcaaggtcaaggaggccctccaggacgccggcatcgacgccctcggcaaggaaaagaagaacatcggctgcgtgctcggcattggcggcggccaaaagtccagccacgagttctactcgcgccttaattatgttgtcgtggagaaggtcctccgcaagatgggcatgcccgaggaggacgtcaaggtcgccgtcgaaaagtacaaggccaacttccccgagtggcgcctcgactccttccctggcttcctcggcaacgtcaccgccggtcgctgcaccaacaccttcaacctcgacggcatgaactgcgttgtcgacgccgcatgcgcctcgtccctcatcgccgtcaaggtcgccatcgacgagctgctctacggtgactgcgacatgatggtcaccggtgccacctgcacggataactccatcggcatgtacatggccttctccaagacccccgtgttctccacggaccccagcgtgcgcgcctacgacgaaaagacaaagggcatgctcatcggcgagggctccgccatgctcgtcctcaagcgctacgccgacgccgtccgcgacggcgatgagatccacgctgttattcgcggctgcgcctcctccagtgatggcaaggccgccggcatctacacgcccaccatttcgggccaggaggaggccctccgccgcgcctacaaccgcgcctgtgtcgacccggccaccgtcactctcgtcgagggtcacggcaccggtactcccgttggcgaccgcatcgagctcaccgccttgcgcaacctctttgacaaggcctacggcgagggcaacaccgaaaaggtcgctgtgggcagcatcaagtccagcatcggccatctcaaggccgtcgccggtctcgccggtatgatcaaggtcatcatggcgctcaagcacaagactctcccgggcaccatcaacgtcgacaacccacccaacctctacgacaacacgcccatcaacgagtcctcgctctacattaacaccatgaaccgcccctggttcccgccccctggtgtgccccgccgcgccggcatttcgagctttggctttggtggcgccaactaccacgccgtcctcgaggaggccgagcccgagcacacgaccgcgtaccgcctcaacaagcgcccgcagcccgtgctcatgatggccgccacgcccgcggccctccagtcgctctgcgaggcccagctcaaggagttcgaggccgccatcaaggagaacgagaccgtcaagaacaccgcctacatcaagtgcgtcaagttcggcgagcagttcaaattccctggctccatcccggccacaaacgcgcgcctcggcttcctcgtcaaggatgctgaggatgcctgctccaccctccgtgccatctgcgcccaattcgccaaggatgtcaccaaggaggcctggcgcctcccccgcgagggcgtcagcttccgcgccaagggcatcgccaccaacggcgctgtcgccgcgctcttctccggccagggcgcgcagtacacgcacatgtttagcgaggtggccatgaactggccccagttccgccagagcattgccgccatggacgccgcccagtccaaggtcgctggaagcgacaaggactttgagcgcgtctcccaggtcctctacccgcgcaagccgtacgagcgtgagcccgagcaggaccacaagaagatctccctcaccgcctactcgcagccctcgaccctggcctgcgctctcggtgcctttgagatcttcaaggaggccggcttcaccccggactttgccgccggccattcgctcggtgagttcgccgccctctacgccgcgggctgcgtcgaccgcgacgagctctttgagcttgtctgccgccgcgcccgcatcatgggcggcaaggacgcaccggccacccccaagggctgcatggccgccgtcattggccccaacgccgagaacatcaaggtccaggccgccaacgtctggctcggcaactccaactcgccttcgcagaccgtcatcaccggctccgtcgaaggtatccaggccgagagcgcccgcctccagaaggagggcttccgcgtcgtgcctcttgcctgcgagagcgccttccactcgccccagatggagaacgcctcgtcggccttcaaggacgtcatctccaaggtctccttccgcacccccaaggccgagaccaagctcttcagcaacgtctctggcgagacctaccccacggacgcccgcgagatgcttacgcagcacatgaccagcagcgtcaagttcctcacccaggtccgcaacatgcaccaggccggtgcgcgcatctttgtcgagttcggacccaagcaggtgctctccaagcttgtctccgagaccctcaaggatgacccctcggttgtcaccgtctctgtcaacccggcctcgggcacggattcggacatccagctccgcgacgcggccgtccagctcgttgtcgctggcgtcaaccttcagggctttgacaagtgggacgcccccgatgccacccgcatgcaggccatcaagaagaagcgcactaccctccgcctttcggccgccacctacgtctcggacaagaccaagaaggtccgcgacgccgccatgaacgatggccgctgcgtcacctacctcaagggcgccgcaccgctcatcaaggccccggagcccgttgtcgacgaggccgccaagcgcgaggccgagcgtctccagaaggagcttcaggatgcccagcgccagctcgacgacgccaagcgcgccgccgccgaggccaactccaagctcgccgctgccaaggaggaggccaagaccgccgctgcttcggccaagcccgcagttgacactgctgttgtcgaaaagcatcgtgccatcctcaagtccatgctcgcggagctcgatggctacggatcggtcgacgcttcttccctccagcagcagcagcagcagcagacggcccccgccccggtcaaggctgctgcgcctgccgcccccgttgcctcggcccctgccccggctgtctcgaacgagcttcttgagaaggccgagactgtcgtcatggaggtcctcgccgccaagaccggctacgagaccgacatgatcgaggctgacatggagctcgagaccgagctcggcattgactccatcaagcgtgtcgagatcctctccgaggtccaggccatgctcaatgtcgaggccaaggatgtcgatgccctcagccgcactcgcactgttggtgaggttgtcaacgccatgaaggccgagatcgctggcagctctgccccggcgcctgctgccgctgctccggctccggccaaggctgcccctgccgccgctgcgcctgctgtctcgaacgagcttctcgagaaggccgagaccgtcgtcatggaggtcctcgccgccaagactggctacgagactgacatgatcgagtccgacatggagctcgagactgagctcggcattgactccatcaagcgtgtcgagatcctctccgaggttcaggccatgctcaacgtcgaggccaaggacgtcgacgctctcagccgcactcgcactgtgggtgaggtcgtcaacgccatgaaggctgagatcgctggtggctctgccccggcgcctgccgccgctgccccaggtccggctgctgccgcccctgcgcctgccgccgccgcccctgctgtctcgaacgagcttcttgagaaggccgagaccgtcgtcatggaggtcctcgccgccaagactggctacgagactgacatgatcgagtccgacatggagctcgagaccgagctcggcattgactccatcaagcgtgtcgagattctctccgaggtccaggccatgctcaacgtcgaggccaaggacgtcgacgctctcagccgcacccgcactgttggcgaggtcgtcgatgccatgaaggccgagatcgctggtggctctgccccggcgcctgccgccgctgctcctgctccggctgctgccgcccctgcgcctgccgcccctgcgcctgctgtctcgagcgagcttctcgagaaggccgagactgtcgtcatggaggtcctcgccgccaagactggctacgagactgacatgatcgagtccgacatggagctcgagaccgagctcggcattgactccatcaagcgtgtcgagattctctccgaggtccaggccatgctcaacgtcgaggccaaggacgtcgacgctctcagccgcacccgcactgttggcgaggtcgtcgatgccatgaaggccgagatcgctggtggctctgccccggcgcctgccgccgctgctcctgctccggctgctgccgcccctgcgcctgccgcccctgcgcctgccgcccctgcgcctgctgtctcgagcgagcttctcgagaaggccgagactgtcgtcatggaggtcctcgccgccaagactggctacgagactgacatgattgagtccgacatggagctcgagaccgagctcggcattgactccatcaagcgtgtcgagattctctccgaggttcaggccatgctcaacgtcgaggccaaggacgtcgacgctctcagccgcactcgcactgttggtgaggtcgtcgatgccatgaaggctgagatcgctggcagctccgcctcggcgcctgccgccgctgctcctgctccggctgctgccgctcctgcgcccgctgccgccgcccctgctgtctcgaacgagcttctcgagaaagccgagactgtcgtcatggaggtcctcgccgccaagactggctacgagactgacatgatcgagtccgacatggagctcgagactgagctcggcattgactccatcaagcgtgtcgagatcctctccgaggttcaggccatgctcaacgtcgaggccaaggacgtcgatgccctcagccgcacccgcactgttggcgaggttgtcgatgccatgaaggccgagatcgctggtggctctgccccggcgcctgccgccgctgcccctgctccggctgccgccgcccctgctgtctcgaacgagcttctcgagaaggccgagactgtcgtcatggaggtcctcgccgccaagactggctacgagaccgacatgatcgagtccgacatggagctcgagaccgagctcggcattgactccatcaagcgtgtcgagattctctccgaggttcaggccatgctcaacgtcgaggccaaggacgtcgatgctctcagccgcactcgcactgttggcgaggtcgtcgatgccatgaaggctgagatcgccggcagctccgccccggcgcctgccgccgctgctcctgctccggctgctgccgctcctgcgcccgctgccgctgcccctgctgtctcgagcgagcttctcgagaaggccgagaccgtcgtcatggaggtcctcgccgccaagactggctacgagactgacatgattgagtccgacatggagctcgagactgagctcggcattgactccatcaagcgtgtcgagatcctctccgaggttcaggccatgctcaacgtcgaggccaaggacgtcgatgccctcagccgcacccgcactgttggcgaggttgtcgatgccatgaaggccgagatcgctggtggctctgccccggcgcctgccgccgctgcccctgctccggctgccgccgcccctgctgtctcgaacgagcttcttgagaaggccgagaccgtcgtcatggaggtcctcgccgccaagactggctacgagaccgacatgatcgagtccgacatggagctcgagaccgagctcggcattgactccatcaagcgtgtcgagattctctccgaggttcaggccatgctcaacgtcgaggccaaggacgtcgacgctctcagccgcactcgcactgttggcgaggtcgtcgatgccatgaaggctgagatcgctggtggctctgccccggcgcctgccgccgctgctcctgcctcggctggcgccgcgcctgcggtcaagattgactcggtccacggcgctgactgtgatgatctttccctgatgcacgccaaggtggttgacatccgccgcccggacgagctcatcctggagcgccccgagaaccgccccgttctcgttgtcgatgacggcagcgagctcaccctcgccctggtccgcgtcctcggcgcctgcgccgttgtcctgacctttgagggtctccagctcgctcagcgcgctggtgccgctgccatccgccacgtgctcgccaaggatctttccgcggagagcgccgagaaggccatcaaggaggccgagcagcgctttggcgctctcggcggcttcatctcgcagcaggcggagcgcttcgagcccgccgaaatcctcggcttcacgctcatgtgcgccaagttcgccaaggcttccctctgcacggctgtggctggcggccgcccggcctttatcggtgtggcgcgccttgacggccgcctcggattcacttcgcagggcacttctgacgcgctcaagcgtgcccagcgtggtgccatctttggcctctgcaagaccatcggcctcgagtggtccgagtctgacgtcttttcccgcggcgtggacattgctcagggcatgcaccccgaggatgccgccgtggcgattgtgcgcgagatggcgtgcgctgacattcgcattcgcgaggtcggcattggcgcaaaccagcagcgctgcacgatccgtgccgccaagctcgagaccggcaacccgcagcgccagatcgccaaggacgacgtgctgctcgtttctggcggcgctcgcggcatcacgcctctttgcatccgggagatcacgcgccagatcgcgggcggcaagtacattctgcttggccgcagcaaggtctctgcgagcgaaccggcatggtgcgctggcatcactgacgagaaggctgtgcaaaaggctgctacccaggagctcaagcgcgcctttagcgctggcgagggccccaagcccacgccccgcgctgtcactaagcttgtgggctctgttcttggcgctcgcgaggtgcgcagctctattgctgcgattgaagcgctcggcggcaaggccatctactcgtcgtgcgacgtgaactctgccgccgacgtggccaaggccgtgcgcgatgccgagtcccagctcggtgcccgcgtctcgggcatcgttcatgcctcgggcgtgctccgcgaccgtctcatcgagaagaagctccccgacgagttcgacgccgtctttggcaccaaggtcaccggtctcgagaacctcctcgccgccgtcgaccgcgccaacctcaagcacatggtcctcttcagctcgctcgccggcttccacggcaacgtcggccagtctgactacgccatggccaacgaggcccttaacaagatgggcctcgagctcgccaaggacgtctcggtcaagtcgatctgcttcggtccctgggacggtggcatggtgacgccgcagctcaagaagcagttccaggagatgggcgtgcagatcatcccccgcgagggcggcgctgataccgtggcgcgcatcgtgctcggctcctcgccggctgagatccttgtcggcaactggcgcaccccgtccaagaaggtcggctcggacaccatcaccctgcaccgcaagatttccgccaagtccaaccccttcctcgaggaccacgtcatccagggccgccgcgtgctgcccatgacgctggccattggctcgctcgcggagacctgcctcggcctcttccccggctactcgctctgggccattgacgacgcccagctcttcaagggtgtcactgtcgacggcgacgtcaactgcgaggtgaccctcaccccgtcgacggcgccctcgggccgcgtcaacgtccaggccacgctcaagaccttttccagcggcaagctggtcccggcctaccgcgccgtcatcgtgctctccaaccagggcgcgcccccggccaacgccaccatgcagccgccctcgctcgatgccgatccggcgctccagggctccgtctacgacggcaagaccctcttccacggcccggccttccgcggcatcgatgacgtgctctcgtgcaccaagagccagcttgtggccaagtgcagcgctgtccccggctccgacgccgctcgcggcgagtttgccacggacactgacgcccatgaccccttcgtgaacgacctggcctttcaggccatgctcgtctgggtgcgccgcacgctcggccaggctgcgctccccaactcgatccagcgcatcgtccagcaccgcccggtcccgcaggacaagcccttctacattaccctccgctccaaccagtcgggcggtcactcccagcacaagcacgcccttcagttccacaacgagcagggcgatctcttcattgatgtccaggcttcggtcatcgccacggacagccttgccttctaaatctaaactaggccatggtgacttaaggtagttagcttaatcacttaggtcaccagtatgaactaaaatgcatgtaggtgtaagagctcatggagagcatggaatattgtatccgaccatgtaacagtataataactgagctccatctcacttcttctatgaataaacaaaggatgttatgatatattaacactctatctatgcaccttattgttctatgataaatttcctcttattattataaatcatctgaatcgtgacggcttatggaatgcttcaaatagtacaaaaacaaatgtgtactataagactttctaaacaattctaactttagcattgtgaacgagacataagtgttaagaagacataacaattataatggaagaagtttgtctccatttatatattatatattacccacttatgtattatattaggatgttaaggagacataacaattataaagagagaagtttgtatccatttatatattatatactacccatttatatattatacttatccacttatttaatgtctttataaggtttgatccatgatatttctaatattttagttgatatgtatatgaaaaggtactatttgaactctcttactctgtataaaggttggatcatccttaaagtgggtctatttaattttattgcttcttacagataaaaaaaaaattatgagttggtttgataaaatattgaaggatttaaaataataataaataataaataacatataatatatgtatataaatttattataatataacatttatctataaaaaagtaaatattgtcataaatctatacaatcgtttagccttgctggaacgaatctcaattatttaaacgagagtaaacatatttgactttttggttatttaacaaattattatttaacactatatgaaattttttttttttatcagcaaagaataaaattaaattaagaaggacaatggtgtcccaatccttatacaaccaacttccacaagaaagtcaagtcagagacaacaaaaaaacaagcaaaggaaattttttaatttgagttgtcttgtttgctgcataatttatgcagtaaaacactacacataacccttttagcagtagagcaatggttgaccgtgtgcttagcttcttttattttatttttttatcagcaaagaataaataaaataaaatgagacacttcagggatgtttcaacccttatacaaaaccccaaaaacaagtttcctagcaccctaccaacgaattcgcggccgcttaattaagatgagtgatactcaggactcaggactcactctgctgatcactagtgctagcctcgaggtcgacacaactttgtatacaaaagttgtctagacctaggctcagcaactcatccagtcaagttcgagtcagtgagttgggcggccgcctcccagtatcattatagtgaaagttttggctctctcgccggtggttttttacctctatttaaaggggttttccacctaaaaattctggtatcattctcactttacttgttactttaatttctcataatctttggttgaaattatcacgcttccgcacacgatatccctacaaatttattatttgttaaacattttcaaaccgcataaaattttatgaagtcccgtctatctttaatgtagtctaacattttcatattgaaatatataatttacttaattttagcgttggtagaaagcataatgatttattcttattcttcttcatataaatgtttaatatacaatataaacaaattctttaccttaagaaggatttcccattttatattttaaaaatatatttatcaaatatttttcaaccacgtaaatctcataataataagttgtttcaaaagtaataaaatttaactccataatttttttattcgactgatcttaaagcaacacccagtgacacaactagccatttttttctttgaataaaaaaatccaattatcattgtattttttttatacaatgaaaatttcaccaaacaatgatttgtggtatttctgaagcaagtcatgttatgcaaaattctataattcccatttgacactacggaagtaactgaagatctgcttttacatgcgagacacatcttctaaagtaattttaataatagttactatattcaagatttcatatatcaaatactcaatattacttctaaaaaattaattagatataattaaaatattacttttttaattttaagtttaattgttgaatttgtgactattgatttattattctactatgtttaaattgttttatagatagtttaaagtaaatataagtaatgtagtagagtgttagagtgttaccctaaaccataaactataagatttatggtggactaattttcatatatttcttattgcttttaccttttcttggtatgtaagtccgtaactggaattactgtgggttgccatgacactctgtggtcttttggttcatgcatggatcttgcgcaagaaaaagacaaagaacaaagaaaaaagacaaaacagagagacaaaacgcaatcacacaaccaactcaaattagtcactggctgatcaagatcgccgcgtccatgtatgtctaaatgccatgcaaagcaacacgtgcttaacatgcactttaaatggctcacccatctcaacccacacacaaacacattgcctttttcttcatcatcaccacaaccacctgtatatattcattctcttccgccacctcaatttcttcacttcaacacacgtcaacctgcatatgcgtgtcatcccatgcccaaatctccatgcatgttccaaccaccttctctcttatataatacctataaatacctctaatatcactcacttctttcatcatccatccatccagagtactactactctactactataataccccaacccaactcatattcaatactactctaggatccggccatctaggccggatccacaaccaaaaatggccgctcgcaacgtgtctgcagcgcatgagatgcacgatgaaaagcgcatcgccgtcgtcggcatggccgtccagtacgccggatgcaaaaccaaggacgagttctgggaggtgctcatgaacggcaaggtcgagtccaaggtgatcagcgacaaacgactcggctccaactaccgcgccgagcactacaaagcagagcgcagcaagtatgccgacaccttttgcaacgaaacgtacggcacccttgacgagaacgagatcgacaacgagcacgaactcctcctcaacctcgccaagcaggcactcgcagagacatccgtcaaagactcgacacgctgcggcatcgtcagcggctgcctctcgttccccatggacaacctccagggtgaactcctcaacgtgtaccaaaaccatgtcgagaaaaagctcggggcccgcgtcttcaaggacgcctcccattggtccgaacgcgagcagtccaacaaacccgaggccggtgaccgccgcatcttcatggacccggcctccttcgtcgccgaagaactcaacctcggcgcccttcactactccgtcgacgcagcatgcgccacggcgctctacgtgctccgcctcgcgcaggatcatctcgtctccggcgccgccgacgtcatgctctgcggtgccacctgcctgccggagccctttttcatcctttcgggcttttccaccttccaggccatgcccgtcggcacgggccagaacgtgtccatgccgctgcacaaggacagccagggcctcaccccgggtgagggcggctccatcatggtcctcaagcgtctcgatgatgccatccgcgacggcgaccacatctacggcacccttctcggcgccaatgtcagcaactccggcacaggtctgcccctcaagccccttctccccagcgagaaaaagtgcctcatggacacctacacgcgcattaacgtgcacccgcacaagattcagtacgtcgagtgccacgccaccggcacgccccagggtgatcgtgtggaaatcgacgccgtcaaggcctgctttgaaggcaaggtcccccgtttcggtaccacaaagggcaactttggacacaccctcgtcgcagccggctttgccggtatgtgcaaggtcctcctctccatgaagcatggcatcatcccgcccaccccgggtatcgatgacgagaccaagatggaccctctcgtcgtctccggtgaggccatcccatggccagagaccaacggcgagcccaagcgcgccggtctctcggcctttggctttggtggcaccaacgcccatgccgtctttgaggagcatgacccctccaacgccgcctgcacgggccacgactccatttctgcgctctcggcccgctgcggcggtgaaagcaacatgcgcatcgccatcactggtatggacgccacctttggcgctctcaagggactcgacgccttcgagcgcgccatttacaccggcgctcacggtgccatcccactcccagaaaagcgctggcgctttctcggcaaggacaaggactttcttgacctctgcggcgtcaaggccaccccgcacggctgctacattgaagatgttgaggtcgacttccagcgcctccgcacgcccatgacccctgaagacatgctcctccctcagcagcttctggccgtcaccaccattgaccgcgccatcctcgactcgggaatgaaaaagggtggcaatgtcgccgtctttgtcggcctcggcaccgacctcgagctctaccgtcaccgtgctcgcgtcgctctcaaggagcgcgtccgccctgaagcctccaagaagctcaatgacatgatgcagtacattaacgactgcggcacatccacatcgtacacctcgtacattggcaacctcgtcgccacgcgcgtctcgtcgcagtggggcttcacgggcccctcctttacgatcaccgagggcaacaactccgtctaccgctgcgccgagctcggcaagtacctcctcgagaccggcgaggtcgatggcgtcgtcgttgcgggtgtcgatctctgcggcagtgccgaaaacctttacgtcaagtctcgccgcttcaaggtgtccacctccgataccccgcgcgccagctttgacgccgccgccgatggctactttgtcggcgagggctgcggtgcctttgtgctcaagcgtgagactagctgcaccaaggacgaccgtatctacgcttgcatggatgccatcgtccctggcaacgtccctagcgcctgcttgcgcgaggccctcgaccaggcgcgcgtcaagccgggcgatatcgagatgctcgagctcagcgccgactccgcccgccacctcaaggacccgtccgtcctgcccaaggagctcactgccgaggaggaaatcggcggccttcagacgatccttcgtgacgatgacaagctcccgcgcaacgtcgcaacgggcagtgtcaaggccaccgtcggtgacaccggttatgcctctggtgctgccagcctcatcaaggctgcgctttgcatctacaaccgctacctgcccagcaacggcgacgactgggatgaacccgcccctgaggcgccctgggacagcaccctctttgcgtgccagacctcgcgcgcttggctcaagaaccctggcgagcgtcgctatgcggccgtctcgggcgtctccgagacgcgctcgtgctattccgtgctcctctccgaagccgagggccactacgagcgcgagaaccgcatctcgctcgacgaggaggcgcccaagctcattgtgcttcgcgccgactcccacgaggagatccttggtcgcctcgacaagatccgcgagcgcttcttgcagcccacgggcgccgccccgcgcgagtccgagctcaaggcgcaggcccgccgcatcttcctcgagctcctcggcgagacccttgcccaggatgccgcttcttcaggctcgcaaaagcccctcgctctcagcctcgtctccacgccctccaagctccagcgcgaggtcgagctcgcggccaagggtatcccgcgctgcctcaagatgcgccgcgattggagctcccctgctggcagccgctacgcgcctgagccgctcgccagcgaccgcgtcgccttcatgtacggcgaaggtcgcagcccttactacggcatcacccaagacattcaccgcatttggcccgaactccacgaggtcatcaacgaaaagacgaaccgtctctgggccgaaggcgaccgctgggtcatgccgcgcgccagcttcaagtcggagctcgagagccagcagcaagagtttgatcgcaacatgattgaaatgttccgtcttggaatcctcacctcaattgccttcaccaatctggcgcgcgacgttctcaacatcacgcccaaggccgcctttggcctcagtcttggcgagatttccatgatttttgccttttccaagaagaacggtctcatctccgaccagctcaccaaggatcttcgcgagtccgacgtgtggaacaaggctctggccgttgaatttaatgcgctgcgcgaggcctggggcattccacagagtgtccccaaggacgagttctggcaaggctacattgtgcgcggcaccaagcaggatatcgaggcggccatcgccccggacagcaagtacgtgcgcctcaccatcatcaatgatgccaacaccgccctcattagcggcaagcccgacgcctgcaaggctgcgatcgcgcgtctcggtggcaacattcctgcgcttcccgtgacccagggcatgtgcggccactgccccgaggtgggaccttataccaaggatatcgccaagatccatgccaaccttgagttccccgttgtcgacggccttgacctctggaccacaatcaaccagaagcgcctcgtgccacgcgccacgggcgccaaggacgaatgggccccttcttcctttggcgagtacgccggccagctctacgagaagcaggctaacttcccccaaatcgtcgagaccatttacaagcaaaactacgacgtctttgtcgaggttgggcccaacaaccaccgtagcaccgcagtgcgcaccacgcttggtccccagcgcaaccaccttgctggcgccatcgacaagcagaacgaggatgcttggacgaccatcgtcaagcttgtggcttcgctcaaggcccaccttgttcctggcgtcacgatctcgccgctgtaccactccaagcttgtggcggaggctgaggcttgctacgctgcgctctgcaagggtgaaaagcccaagaagaacaagtttgtgcgcaagattcagctcaacggtcgcttcaacagcaaggcggaccccatctcctcggccgatcttgccagctttccgcctgcggaccctgccattgaagccgccatctcgagccgcatcatgaagccggttgctccgaagttctacgcgcgtctcaacattgacgagcaggacgagacccgtgatccgatcctcaacaaggacaacgcgccgtcttccagctctagctcctcttccagctcttccagctcttccagcccgtcgccagctccgtccgccccagtgcaaaagaaggctgctccggccgcggagaccaaggctgttgcttcggctgacgcacttcgcagtgccctgctcgatctcgacagtatgcttgcgctgagctctgccagtgcctccggcaaccttgttgagactgcgcctagcgacgcctcggtcattgtgccgccctgcaacattgcggatctcggcagccgcgccttcatgaaaacgtacggtgtttcggcgcctctgtacacgggcgccatggccaagggcattgcctctgcggacctcgtcattgccgccggccgccagggcatccttgcgtcctttggcgccggcggacttcccatgcaggttgtgcgtgagtccatcgaaaagattcaggccgccctgcccaatggcccgtacgctgtcaaccttatccattctccctttgacagcaacctcgaaaagggcaatgtcgatctcttcctcgagaagggtgtcacctttgtcgaggcctcggcctttatgacgctcaccccgcaggtcgtgcggtaccgcgcggctggcctcacgcgcaacgccgacggctcggtcaacatccgcaaccgtatcattggcaaggtctcgcgcaccgagctcgccgagatgttcatgcgtcctgcgcccgagcaccttcttcagaagctcattgcttccggcgagatcaaccaggagcaggccgagctcgcccgccgtgttcccgtcgctgacgacatcgcggtcgaagctgactcgggtggccacaccgacaaccgccccatccacgtcattctgcccctcatcatcaaccttcgcgaccgccttcaccgcgagtgcggctacccggccaaccttcgcgtccgtgtgggcgccggcggtggcattgggtgcccccaggcggcgctggccaccttcaacatgggtgcctcctttattgtcaccggcaccgtgaaccaggtcgccaagcagtcgggcacgtgcgacaatgtgcgcaagcagctcgcgaaggccacttactcggacgtatgcatggccccggctgccgacatgttcgaggaaggcgtcaagcttcaggtcctcaagaagggaaccatgtttccctcgcgcgccaacaagctctacgagctcttttgcaagtacgactcgttcgagtccatgccccccgcagagcttgcgcgcgtcgagaagcgcatcttcagccgcgcgctcgaagaggtctgggacgagaccaaaaacttttacattaaccgtcttcacaacccggagaagatccagcgcgccgagcgcgaccccaagctcaagatgtcgctgtgctttcgctggtacctgagcctggcgagccgctgggccaacactggagcttccgatcgcgtcatggactaccaggtctggtgcggtcctgccattggttccttcaacgatttcatcaagggaacttaccttgatccggccgtcgcaaacgagtacccgtgcgtcgttcagattaacaagcagatccttcgtggagcgtgcttcttgcgccgtctcgaaattctgcgcaacgcacgcctttccgatggcgctgccgctcttgtggccagcatcgatgacacatacgtcccggccgagaagctgtgagtagttagcttaatcacttaggtcaccggcctagtaggccggtcaccagtatgaactaaaatgcatgtaggtgtaagagctcatggagagcatggaatattgtatccgaccatgtaacagtataataactgagctccatctcacttcttctatgaataaacaaaggatgttatgatatattaacactctatctatgcaccttattgttctatgataaatttcctcttattattataaatcatctgaatcgtgacggcttatggaatgcttcaaatagtacaaaaacaaatgtgtactataagactttctaaacaattctaactttagcattgtgaacgagacataagtgttaagaagacataacaattataatggaagaagtttgtctccatttatatattatatattacccacttatgtattatattaggatgttaaggagacataacaattataaagagagaagtttgtatccatttatatattatatactacccatttatatattatacttatccacttatttaatgtctttataaggtttgatccatgatatttctaatattttagttgatatgtatatgaaaaggtactatttgaactctcttactctgtataaaggttggatcatccttaaagtgggtctatttaattttattgcttcttacagataaaaaaaaaattatgagttggtttgataaaatattgaaggatttaaaataataataaataataaataacatataatatatgtatataaatttattataatataacatttatctataaaaaagtaaatattgtcataaatctatacaatcgtttagccttgctggaacgaatctcaattatttaaacgagagtaaacatatttgactttttggttatttaacaaattattatttaacactatatgaaattttttttttttatcagcaaagaataaaattaaattaagaaggacaatggtgtcccaatccttatacaaccaacttccacaagaaagtcaagtcagagacaacaaaaaaacaagcaaaggaaattttttaatttgagttgtcttgtttgctgcataatttatgcagtaaaacactacacataacccttttagcagtagagcaatggttgaccgtgtgcttagcttcttttattttatttttttatcagcaaagaataaataaaataaaatgagacacttcagggatgtttcaacccttatacaaaaccccaaaaacaagtttcctagcaccctaccaacgaattcgcggccgcttaattaatctgacctgaccactagacctgagtgagtacagatgtgctactagtgctagcctcgaggtcgaccaacttttctatacaaagttgtctagacctaggactaggcactgagtgactcactgacctgactgagtgactggcggccgcctcccagtatcattatagtgaaagttttggctctctcgccggtggttttttacctctatttaaaggggttttccacctaaaaattctggtatcattctcactttacttgttactttaatttctcataatctttggttgaaattatcacgcttccgcacacgatatccctacaaatttattatttgttaaacattttcaaaccgcataaaattttatgaagtcccgtctatctttaatgtagtctaacattttcatattgaaatatataatttacttaattttagcgttggtagaaagcataatgatttattcttattcttcttcatataaatgtttaatatacaatataaacaaattctttaccttaagaaggatttcccattttatattttaaaaatatatttatcaaatatttttcaaccacgtaaatctcataataataagttgtttcaaaagtaataaaatttaactccataatttttttattcgactgatcttaaagcaacacccagtgacacaactagccatttttttctttgaataaaaaaatccaattatcattgtattttttttatacaatgaaaatttcaccaaacaatgatttgtggtatttctgaagcaagtcatgttatgcaaaattctataattcccatttgacactacggaagtaactgaagatctgcttttacatgcgagacacatcttctaaagtaattttaataatagttactatattcaagatttcatatatcaaatactcaatattacttctaaaaaattaattagatataattaaaatattacttttttaattttaagtttaattgttgaatttgtgactattgatttattattctactatgtttaaattgttttatagatagtttaaagtaaatataagtaatgtagtagagtgttagagtgttaccctaaaccataaactataagatttatggtggactaattttcatatatttcttattgcttttaccttttcttggtatgtaagtccgtaactggaattactgtgggttgccatgacactctgtggtcttttggttcatgcatggatcttgcgcaagaaaaagacaaagaacaaagaaaaaagacaaaacagagagacaaaacgcaatcacacaaccaactcaaattagtcactggctgatcaagatcgccgcgtccatgtatgtctaaatgccatgcaaagcaacacgtgcttaacatgcactttaaatggctcacccatctcaacccacacacaaacacattgcctttttcttcatcatcaccacaaccacctgtatatattcattctcttccgccacctcaatttcttcacttcaacacacgtcaacctgcatatgcgtgtcatcccatgcccaaatctccatgcatgttccaaccaccttctctcttatataatacctataaatacctctaatatcactcacttctttcatcatccatccatccagagtactactactctactactataataccccaacccaactcatattcaatactactctaggatccggccatctaggccggatccacaaccaaaaatggcgctccgtgtcaagacgaacaagaagccatgctgggagatgaccaaggaggagctgaccagcggcaagaccgaggtgttcaactatgaggaactcctcgagttcgcagagggcgacatcgccaaggtcttcggacccgagttcgccgtcatcgacaagtacccgcgccgcgtgcgcctgcccgcccgcgagtacctgctcgtgacccgcgtcaccctcatggacgccgaggtcaacaactaccgcgtcggcgcccgcatggtcaccgagtacgatctccccgtcaacggagagctctccgagggcggagactgcccctgggccgtcctggtcgagagtggccagtgcgatctcatgctcatctcctacatgggcattgacttccagaaccagggcgaccgcgtctaccgcctgctcaacaccacgctcaccttttacggcgtggcccacgagggcgagaccctcgagtacgacattcgcgtcaccggcttcgccaagcgtctcgacggcggcatctccatgttcttcttcgagtacgactgctacgtcaacggccgcctcctcatcgagatgcgcgatggctgcgccggcttcttcaccaacgaggagctcgacgccggcaagggcgtcgtcttcacccgcggcgacctcgccgcccgcgccaagatcccaaagcaggacgtctccccctacgccgtcgccccctgcctccacaagaccaagctcaacgaaaaggagatgcagaccctcgtcgacaaggactgggcatccgtctttggctccaagaacggcatgccggaaatcaactacaaactctgcgcgcgtaagatgctcatgattgaccgcgtcaccagcattgaccacaagggcggtgtctacggcctcggtcagctcgtcggtgaaaagatcctcgagcgcgaccactggtactttccctgccactttgtcaaggatcaggtcatggccggatccctcgtctccgacggctgcagccagatgctcaagatgtacatgatctggctcggcctccacctcaccaccggaccctttgacttccgcccggtcaacggccaccccaacaaggtccgctgccgcggccaaatctccccgcacaagggcaagctcgtctacgtcatggagatcaaggagatgggcttcgacgaggacaacgacccgtacgccattgccgacgtcaacatcattgatgtcgacttcgaaaagggccaggactttagcctcgaccgcatcagcgactacggcaagggcgacctcaacaagaagatcgtcgtcgactttaagggcatcgctctcaagatgcagaagcgctccaccaacaagaacccctccaaggttcagcccgtctttgccaacggcgccgccactgtcggccccgaggcctccaaggcttcctccggcgccagcgccagcgccagcgccgccccggccaagcctgccttcagcgccgatgttcttgcgcccaagcccgttgcccttcccgagcacatcctcaagggcgacgccctcgcccccaaggagatgtcctggcaccccatggcccgcatcccgggcaacccgacgccctcttttgcgccctcggcctacaagccgcgcaacatcgcctttacgcccttccccggcaaccccaacgataacgaccacaccccgggcaagatgccgctcacctggttcaacatggccgagttcatggccggcaaggtcagcatgtgcctcggccccgagttcgccaagttcgacgactcgaacaccagccgcagccccgcttgggacctcgctctcgtcacccgcgccgtgtctgtgtctgacctcaagcacgtcaactaccgcaacatcgacctcgacccctccaagggtaccatggtcggcgagttcgactgccccgcggacgcctggttctacaagggcgcctgcaacgatgcccacatgccgtactcgatcctcatggagatcgccctccagacctcgggtgtgctcacctcggtgctcaaggcgcccctgaccatggagaaggacgacatcctcttccgcaacctcgacgccaacgccgagttcgtgcgcgccgacctcgactaccgcggcaagactatccgcaacgtcaccaagtgcactggctacagcatgctcggcgagatgggcgtccaccgcttcacctttgagctctacgtcgatgatgtgctcttttacaagggctcgacctcgttcggctggttcgtgcccgaggtctttgccgcccaggccggcctcgacaacggccgcaagtcggagccctggttcattgagaacaaggttccggcctcgcaggtctcctcctttgacgtgcgccccaacggcagcggccgcaccgccatcttcgccaacgcccccagcggcgcccagctcaaccgccgcacggaccagggccagtacctcgacgccgtcgacattgtctccggcagcggcaagaagagcctcggctacgcccacggttccaagacggtcaacccgaacgactggttcttctcgtgccacttttggtttgactcggtcatgcccggaagtctcggtgtcgagtccatgttccagctcgtcgaggccatcgccgcccacgaggatctcgctggcaagcacggcattgccaaccccacctttgtgcacgccccgggcaagatcagctggaagtaccgcggccagctcacgcccaagagcaagaagatggactcggaggtccacatcgtgtccgtggacgcccacgacggcgttgtcgacctcgtcgccgacggcttcctctgggccgacagcctccgcgtctactcggtgagcaacattcgcgtgcgcatcgcctccggtgaggcccctgccgccgcctcctccgccgcctctgtgggctcctcggcttcgtccgtcgagcgcacgcgctcgagccccgctgtcgcctccggcccggcccagaccatcgacctcaagcagctcaagaccgagctcctcgagctcgatgccccgctctacctctcgcaggacccgaccagcggccagctcaagaagcacaccgacgtggcctccggccaggccaccatcgtgcagccctgcacgctcggcgacctcggtgaccgctccttcatggagacctacggcgtcgtcgccccgctgtacacgggcgccatggccaagggcattgcctcggcggacctcgtcatcgccgccggcaagcgcaagatcctcggctcctttggcgccggcggcctccccatgcaccacgtgcgcgccgccctcgagaagatccaggccgccctgcctcagggcccctacgccgtcaacctcatccactcgccttttgacagcaacctcgagaagggcaacgtcgatctcttcctcgagaagggcgtcactgtggtggaggcctcggcattcatgaccctcaccccgcaggtcgtgcgctaccgcgccgccggcctctcgcgcaacgccgacggttcggtcaacatccgcaaccgcatcatcggcaaggtctcgcgcaccgagctcgccgagatgttcatccgcccggccccggagcacctcctcgagaagctcatcgcctcgggcgagatcacccaggagcaggccgagctcgcgcgccgcgttcccgtcgccgacgatatcgctgtcgaggctgactcgggcggccacaccgacaaccgccccatccacgtcatcctcccgctcatcatcaacctccgcaaccgcctgcaccgcgagtgcggctaccccgcgcacctccgcgtccgcgttggcgccggcggtggcgtcggctgcccgcaggccgccgccgccgcgctcaccatgggcgccgccttcatcgtcaccggcactgtcaaccaggtcgccaagcagtccggcacctgcgacaacgtgcgcaagcagctctcgcaggccacctactcggatatctgcatggccccggccgccgacatgttcgaggagggcgtcaagctccaggtcctcaagaagggaaccatgttcccctcgcgcgccaacaagctctacgagctcttttgcaagtacgactccttcgactccatgcctcctgccgagctcgagcgcatcgagaagcgtatcttcaagcgcgcactccaggaggtctgggaggagaccaaggacttttacattaacggtctcaagaacccggagaagatccagcgcgccgagcacgaccccaagctcaagatgtcgctctgcttccgctggtaccttggtcttgccagccgctgggccaacatgggcgccccggaccgcgtcatggactaccaggtctggtgtggcccggccattggcgccttcaacgacttcatcaagggcacctacctcgaccccgctgtctccaacgagtacccctgtgtcgtccagatcaacctgcaaatcctccgtggtgcctgctacctgcgccgtctcaacgccctgcgcaacgacccgcgcattgacctcgagaccgaggatgctgcctttgtctacgagcccaccaacgcgctctaatgagtagttagcttaatcacttaggtcaccggcctagtaggccggtcaccagtatgaactaaaatgcatgtaggtgtaagagctcatggagagcatggaatattgtatccgaccatgtaacagtataataactgagctccatctcacttcttctatgaataaacaaaggatgttatgatatattaacactctatctatgcaccttattgttctatgataaatttcctcttattattataaatcatctgaatcgtgacggcttatggaatgcttcaaatagtacaaaaacaaatgtgtactataagactttctaaacaattctaactttagcattgtgaacgagacataagtgttaagaagacataacaattataatggaagaagtttgtctccatttatatattatatattacccacttatgtattatattaggatgttaaggagacataacaattataaagagagaagtttgtatccatttatatattatatactacccatttatatattatacttatccacttatttaatgtctttataaggtttgatccatgatatttctaatattttagttgatatgtatatgaaaaggtactatttgaactctcttactctgtataaaggttggatcatccttaaagtgggtctatttaattttattgcttcttacagataaaaaaaaaattatgagttggtttgataaaatattgaaggatttaaaataataataaataataaataacatataatatatgtatataaatttattataatataacatttatctataaaaaagtaaatattgtcataaatctatacaatcgtttagccttgctggaacgaatctcaattatttaaacgagagtaaacatatttgactttttggttatttaacaaattattatttaacactatatgaaattttttttttttatcagcaaagaataaaattaaattaagaaggacaatggtgtcccaatccttatacaaccaacttccacaagaaagtcaagtcagagacaacaaaaaaacaagcaaaggaaattttttaatttgagttgtcttgtttgctgcataatttatgcagtaaaacactacacataacccttttagcagtagagcaatggttgaccgtgtgcttagcttcttttattttatttttttatcagcaaagaataaataaaataaaatgagacacttcagggatgtttcaacccttatacaaaaccccaaaaacaagtttcctagcaccctaccaacgaattcgcggccgcttaattaatcacgagtggatgactgtcacgactgactcatgactgactactagtgctagcctcgaggtcgacacaactttgtataataaagttgtctagacctaggcgagtcatgagtcgtgacatgacgtcatgctcatcagactgcggccgcctcccagtatcattatagtgaaagttttggctctctcgccggtggttttttacctctatttaaaggggttttccacctaaaaattctggtatcattctcactttacttgttactttaatttctcataatctttggttgaaattatcacgcttccgcacacgatatccctacaaatttattatttgttaaacattttcaaaccgcataaaattttatgaagtcccgtctatctttaatgtagtctaacattttcatattgaaatatataatttacttaattttagcgttggtagaaagcataatgatttattcttattcttcttcatataaatgtttaatatacaatataaacaaattctttaccttaagaaggatttcccattttatattttaaaaatatatttatcaaatatttttcaaccacgtaaatctcataataataagttgtttcaaaagtaataaaatttaactccataatttttttattcgactgatcttaaagcaacacccagtgacacaactagccatttttttctttgaataaaaaaatccaattatcattgtattttttttatacaatgaaaatttcaccaaacaatgatttgtggtatttctgaagcaagtcatgttatgcaaaattctataattcccatttgacactacggaagtaactgaagatctgcttttacatgcgagacacatcttctaaagtaattttaataatagttactatattcaagatttcatatatcaaatactcaatattacttctaaaaaattaattagatataattaaaatattacttttttaattttaagtttaattgttgaatttgtgactattgatttattattctactatgtttaaattgttttatagatagtttaaagtaaatataagtaatgtagtagagtgttagagtgttaccctaaaccataaactataagatttatggtggactaattttcatatatttcttattgcttttaccttttcttggtatgtaagtccgtaactggaattactgtgggttgccatgacactctgtggtcttttggttcatgcatggatcttgcgcaagaaaaagacaaagaacaaagaaaaaagacaaaacagagagacaaaacgcaatcacacaaccaactcaaattagtcactggctgatcaagatcgccgcgtccatgtatgtctaaatgccatgcaaagcaacacgtgcttaacatgcactttaaatggctcacccatctcaacccacacacaaacacattgcctttttcttcatcatcaccacaaccacctgtatatattcattctcttccgccacctcaatttcttcacttcaacacacgtcaacctgcatatgcgtgtcatcccatgcccaaatctccatgcatgttccaaccaccttctctcttatataatacctataaatacctctaatatcactcacttctttcatcatccatccatccagagtactactactctactactataataccccaacccaactcatattcaatactactctaggatccggccatctaggccggatccacaaccaaaaatggctcccactcccgacgccaccgcgcctctgaacaagccgagcgactatgccgtctaccacgaggaagacggccccttctggaccgccgattccagcggcgtctcgcgcgtgaactttagcgagaccggcgtgggatccgagggcgtcatccctgcgctcacgctcatcgacgtcttcgagagggccgtcaagcgcggcggaaacaggatcgccttccgcacggaaaacatgcccacgctccgccgcggcgaagaggccccggacgcgctgccgctcaaggactggaagtcctggtcctggaaacagtacaaggccgacgtccaccgcatcgccagggctctcatggacctcggcgttgagcagcatgacgccgtctccatttttggctttaactcgcccgaatggtttctcagtgccgtcggcgccgtgcacgcaggtgccaagattgccggcatttacccctcagacacgcccgcccaggtccagtacaaggccttccacagtgacaccgctgttgccgttgtcgaaaacgagcagtgcttcaagaagttcgccgaggtcgtcgaggaccttccttacctcaaggccattgtttgctgggactatgaagccacagacatcacgcgcgaggacggctccgtcgtcgaggtcctcacctttgccgagttcctcaagcgcggcgacaccgtcgaggcggccgcccttgacgagcgcatctccaagatcgagcccaccatgtgcgctgcccttatttacaccagcggtactaccggccgccccaaggccgttatgatttcgcacgacaaccttgttttcgaggccagcgccgtcgtccccaacctcggaggagcctgtacgaccactgctgaggagcgcattctctcgtacctgcctctctcgcacgtcgctggtatgatggttgatattattgcccccatcattgccaccgccttccacaagggccgcatctgcgtctgctttgctcgcccgtacgatttgcgcaccggcacgctgggccagcgcctcaacgccgtggagcccaccatcttccttggcgtgccccgtgtgtgggaaaagattcaggaaaagctcatggccgtcggtgccaaaaccaccggcctcaagaagaagctctctacggccgccaagaagcgtggtcttgaattccaggaggagcagcaaatcggccgctccggtgccaaccctggctttggcccccttggcatctacaagaagctcctcggcctcatcaagggcaagctgggcctcaccaagtgcaagtttgcctttgctggtgccgcgcccatgacccgtgagacccttcagtactttggcgcgctgaacatcaacattaacgaggtctacggcatgtccgagtgctccggtgccgccacctggtccacggacaaggcccacgagtggggcactgttggctacgagatgcccagttgcgaggtccgcgtcttcaagattgccgaggacggtaccaagaccgagtgcccgcgcgccgccgacattatgcatgctaccgaggaggagcagggcgaagtttgcttccgcggccgtaacatcatgatgggctaccttgccaaccccaagcttggcgacgaccacgttgccgagatcgaggagaagaacgctgccgctatcgactccgagggctggctccacagtggtgataagggcgccatttctacccgcggcatgctcaagatcacgggccgctacaaggagctcatcatcggcgccggtggcgagaacgtggcgcccgtccctattgaggacgccatcaaggcgcgcatgccttttgtttccaacgccatgatggtcggagataagcgcaagttcatggctgtcctccttaccctcaagacggttggcgccacgggcgagcttcccggtacgaacaagctcatgggcgctgccgccgactatggtgagaccatcgaggacgcctgcgacaacgaggcgctcattgaggagatcacgcagcagctcaaggagatcggtgatgatggcgatgtcacgccctcgaacgcggctcgcatccaaaagttcaccattctcccgctcgacttttccgtctccacggacgagctcacggccacgctcaagctcaagcgctccgtggtcgcagacaagtacgaagacatcatcgaggccttttacgagtccaagagcgtttttgtgccgtactcgaccgttggcgcctacgccacgggcggcccggtcgacgactccgttgtcgatggctccttcaagggcgactttagcatgattggcgacgatgatccggatcttcaaaacgtcgatgtcctcgaggcgattgacgaggacaattaaatttgagtagttagcttaatcacttaggtcaccggcctagtaggccggtcaccagtatgaactaaaatgcatgtaggtgtaagagctcatggagagcatggaatattgtatccgaccatgtaacagtataataactgagctccatctcacttcttctatgaataaacaaaggatgttatgatatattaacactctatctatgcaccttattgttctatgataaatttcctcttattattataaatcatctgaatcgtgacggcttatggaatgcttcaaatagtacaaaaacaaatgtgtactataagactttctaaacaattctaactttagcattgtgaacgagacataagtgttaagaagacataacaattataatggaagaagtttgtctccatttatatattatatattacccacttatgtattatattaggatgttaaggagacataacaattataaagagagaagtttgtatccatttatatattatatactacccatttatatattatacttatccacttatttaatgtctttataaggtttgatccatgatatttctaatattttagttgatatgtatatgaaaaggtactatttgaactctcttactctgtataaaggttggatcatccttaaagtgggtctatttaattttattgcttcttacagataaaaaaaaaattatgagttggtttgataaaatattgaaggatttaaaataataataaataataaataacatataatatatgtatataaatttattataatataacatttatctataaaaaagtaaatattgtcataaatctatacaatcgtttagccttgctggaacgaatctcaattatttaaacgagagtaaacatatttgactttttggttatttaacaaattattatttaacactatatgaaattttttttttttatcagcaaagaataaaattaaattaagaaggacaatggtgtcccaatccttatacaaccaacttccacaagaaagtcaagtcagagacaacaaaaaaacaagcaaaggaaattttttaatttgagttgtcttgtttgctgcataatttatgcagtaaaacactacacataacccttttagcagtagagcaatggttgaccgtgtgcttagcttcttttattttatttttttatcagcaaagaataaataaaataaaatgagacacttcagggatgtttcaacccttatacaaaaccccaaaaacaagtttcctagcaccctaccaacgaattcgcggccgcttaattaatctgatcatggatgctacgtcacggcagtacaggactatcactagacctaggagctgtgctgggtaactcacatgagtcactggtcacatcagcggccgcctcccagtatcattatagtgaaagttttggctctctcgccggtggttttttacctctatttaaaggggttttccacctaaaaattctggtatcattctcactttacttgttactttaatttctcataatctttggttgaaattatcacgcttccgcacacgatatccctacaaatttattatttgttaaacattttcaaaccgcataaaattttatgaagtcccgtctatctttaatgtagtctaacattttcatattgaaatatataatttacttaattttagcgttggtagaaagcataatgatttattcttattcttcttcatataaatgtttaatatacaatataaacaaattctttaccttaagaaggatttcccattttatattttaaaaatatatttatcaaatatttttcaaccacgtaaatctcataataataagttgtttcaaaagtaataaaatttaactccataatttttttattcgactgatcttaaagcaacacccagtgacacaactagccatttttttctttgaataaaaaaatccaattatcattgtattttttttatacaatgaaaatttcaccaaacaatgatttgtggtatttctgaagcaagtcatgttatgcaaaattctataattcccatttgacactacggaagtaactgaagatctgcttttacatgcgagacacatcttctaaagtaattttaataatagttactatattcaagatttcatatatcaaatactcaatattacttctaaaaaattaattagatataattaaaatattacttttttaattttaagtttaattgttgaatttgtgactattgatttattattctactatgtttaaattgttttatagatagtttaaagtaaatataagtaatgtagtagagtgttagagtgttaccctaaaccataaactataagatttatggtggactaattttcatatatttcttattgcttttaccttttcttggtatgtaagtccgtaactggaattactgtgggttgccatgacactctgtggtcttttggttcatgcatggatcttgcgcaagaaaaagacaaagaacaaagaaaaaagacaaaacagagagacaaaacgcaatcacacaaccaactcaaattagtcactggctgatcaagatcgccgcgtccatgtatgtctaaatgccatgcaaagcaacacgtgcttaacatgcactttaaatggctcacccatctcaacccacacacaaacacattgcctttttcttcatcatcaccacaaccacctgtatatattcattctcttccgccacctcaatttcttcacttcaacacacgtcaacctgcatatgcgtgtcatcccatgcccaaatctccatgcatgttccaaccaccttctctcttatataatacctataaatacctctaatatcactcacttctttcatcatccatccatccagagtactactactctactactataataccccaacccaactcatattcaatactactctaggatccacaaccaaaaatgttgcagcatacttggctaccaaaacccccaaatttaaccttattgtcagatgaagttcatctctggcgcattccccttgaccaaccagaatcacagctacaggatttagccgctaccttatctagtgacgaattagcccgtgcaaacagattttattttcccgaacatcgccggcgttttactgctggtcgtggtattctccgcagtatcttggggggctatttgggtgtggaaccagggcaagttaaatttgattatgaatcccgtggtaaaccaatattaggcgatcgctttgccgagagtggtttattatttaacttgtcacactcccagaacttggccttgtgtgcagtcaattacacgcgccaaatcggcatcgatttagaatatctccgccccacatctgatttagaatcccttgccaaaaggttctttttaccgcgagaatatgaattattgcgatcgctacccgatgagcaaaaacaaaaaattttctttcgttactggacttgtaaagaggcttatcttaaagcaacgggtgacggcatcgctaaattagaggaaattgaaatagcactaactcccacagaaccagctaagttacagacagctccagcgtggagtctcctagagctagtgccagatgataattgtgttgctgctgttgccgtggcgggttttggctggcagccaaaattctggcattattgagtagttagcttaatcacttaggtcaccagtatgaactaaaatgcatgtaggtgtaagagctcatggagagcatggaatattgtatccgaccatgtaacagtataataactgagctccatctcacttcttctatgaataaacaaaggatgttatgatatattaacactctatctatgcaccttattgttctatgataaatttcctcttattattataaatcatctgaatcgtgacggcttatggaatgcttcaaatagtacaaaaacaaatgtgtactataagactttctaaacaattctaactttagcattgtgaacgagacataagtgttaagaagacataacaattataatggaagaagtttgtctccatttatatattatatattacccacttatgtattatattaggatgttaaggagacataacaattataaagagagaagtttgtatccatttatatattatatactacccatttatatattatacttatccacttatttaatgtctttataaggtttgatccatgatatttctaatattttagttgatatgtatatgaaaaggtactatttgaactctcttactctgtataaaggttggatcatccttaaagtgggtctatttaattttattgcttcttacagataaaaaaaaaattatgagttggtttgataaaatattgaaggatttaaaataataataaataataaataacatataatatatgtatataaatttattataatataacatttatctataaaaaagtaaatattgtcataaatctatacaatcgtttagccttgctggaacgaatctcaattatttaaacgagagtaaacatatttgactttttggttatttaacaaattattatttaacactatatgaaattttttttttttatcagcaaagaataaaattaaattaagaaggacaatggtgtcccaatccttatacaaccaacttccacaagaaagtcaagtcagagacaacaaaaaaacaagcaaaggaaattttttaatttgagttgtcttgtttgctgcataatttatgcagtaaaacactacacataacccttttagcagtagagcaatggttgaccgtgtgcttagcttcttttattttatttttttatcagcaaagaataaataaaataaaatgagacacttcagggatgtttcaacccttatacaaaaccccaaaaacaagtttcctagcaccctaccaacgaattcgcggccgcttaattaactactgtcactgaggccgtagacgagtacggactgatctaactagtgctagcctcgaggtcgacacccagctttcttgtacaaagtggttgcggccgcttaattaaatttaaattcaattaatgcaatcttgattttcaacaacgaaggtaatggcgtaaaagaaaaaatgtatgttattgtattgatctttcatgatgttgaagcgtgccataatatgatgatgtataattaaaatattaactgtcgcattttattgaaatggcactgttatttcaaccatatctttgattctgttacatgacacgactgcaagaagtaaataatagacgccgttgttaaagaattgctatcatatgtgcctaactagagggaatttgagcgtcagacctaatcaaatattacaaaatatctcactctgtcgccagcaatggtgtaatcagcgcagacaaatggcgtaaagatcgcggaaaaacctccccgagtggcatgatagctgcctctgtattgctgatttagtcagccttatttgacttaagggtgccctcgttagtgacaaattgctttcaaggagacagccatgccccacactttgttgaaaaacaaattgcctttggggagacggtaaagccagttgctcttcaataaggaatgtcgaggaggcaatgtaaccgcctctggtagtacacttctctaatccaaaaatcaatttgtattcaagataccgcaaaaaacttatggtttaaaccctgcaggactagtccagaaggtaattatccaagatgtagcatcaagaatccaatgtttacgggaaaaactatggaagtattatgtaagctcagcaagaagcagatcaatatgcggcacatatgcaacctatgttcaaaaatgaagaatgtacagatacaagatcctatactgccagaatacgaagaagaatacgtagaaattgaaaaagaagaaccaggcgaagaaaagaatcttgaagacgtaagcactgacgacaacaatgaaaagaagaagataaggtcggtgattgtgaaagagacatagaggacacatgtaaggtggaaaatgtaagggcggaaagtaaccttatcacaaaggaatcttatcccccactacttatccttttatatttttccgtgtcatttttgcccttgagttttcctatataaggaaccaagttcggcatttgtgaaaacaagaaaaaatttggtgtaagctattttctttgaagtactgaggatacaacttcagagaaatttgtaagtttgtaggtaccagatctggatcccaaaccatgtctccggagaggagaccagttgagattaggccagctacagcagctgatatggccgcggtttgtgatatcgttaaccattacattgagacgtctacagtgaactttaggacagagccacaaacaccacaagagtggattgatgatctagagaggttgcaagatagatacccttggttggttgctgaggttgagggtgttgtggctggtattgcttacgctgggccctggaaggctaggaacgcttacgattggacagttgagagtactgtttacgtgtcacataggcatcaaaggttgggcctaggatctacattgtacacacatttgcttaagtctatggaggcgcaaggttttaagtctgtggttgctgttataggccttccaaacgatccatctgttaggttgcatgaggctttgggatacacagcccggggtacattgcgcgcagctggatacaagcatggtggatggcatgatgttggtttttggcaaagggattttgagttgccagctcctccaaggccagttaggccagttacccaaatctgagtagttagcttaatcacctagagctcgatcggcggcaatagcttcttagcgccatcccgggttgatcctatctgtgttgaaatagttgcggtgggcaaggctctctttcagaaagacaggcggccaaaggaacccaaggtgaggtgggctatggctctcagttccttgtggaagcgcttggtctaaggtgcagaggtgttagcgggatgaagcaaaagtgtccgattgtaacaagatatgttgatcctacgtaaggatattaaagtatgtattcatcactaatataatcagtgtattccaatatgtactacgatttccaatgtctttattgtcgccgtatgtaatcggcgtcacaaaataatccccggtgactttcttttaatccaggatgaaataatatgttattataatttttgcgatttggtccgttataggaattgaagtgtgcttgaggtcggtcgccaccactcccatttcataattttacatgtatttgaaaaataaaaatttatggtattcaatttaaacacgtatacttgtaaagaatgatatcttgaaagaaatatagtttaaatatttattgataaaataacaagtcaggtattatagtccaagcaaaaacataaatttattgatgcaagtttaaattcagaaatatttcaataactgattatatcagctggtacattgccgtagatgaaagactgagtgcgatattatggtgtaatacataggaattcgtttaaacgatctgcgtctaattttcggtccaacttgcacaggaaagacgtcgaccgcggtagctcttgcccagcagactgggcttccagtcctttcgctcgatcgggtccaatgttgtcctcagctgtgaaccggaagcggacgaccaacagtggaagaactgaaaggaacgagccgtctataccttgatgatcggcctctggtgaagggtatcatcgcagccaagcaagctcatgaaaggctgatgggggaggtgtataattatgaggcccacggcgggcttattctttagggaggatctatctcgttgctcaagtgcatggcgcaaagcagttattggagtgcggattttcgttggcatattattcgccacgagttagcagacgaagagaccttcatgaacgtggccaaggccagagttaagcagatgttacgccctgctgcaggcctttctattatccaatagttggttgatctttggaaagagcctcggctgaggcccatactgaaagagatcgatggatatcgatatgccatgttgtttgctagccagaaccagatcacatccgatatgctattgcagcttgacgcagatatggaggataagttgattcatgggatcgctcaggagtagctcatccatgcacgccgacaagaacagaaattccgtcgagttaacgcagccgcttacgacggattcgaaggtcatccattcggaatgtattagtttgcaccagctccgcgtcacacctgtcttcatttgaataagatgttagcaattgtttttagctttgtcttgttgtggcagggcggcaagtgcttcagacatcattctgttttcaaattttatgctggagaacagcttcttaattcctttggaaataatagactgcgtcttaaaattcagatgtctggatatagatatgattgtaaaataacctatttaagtgtcatttagaacataagttttatgaatgttcttccattttcgtcatcgaacgaataagagtaaatacaccttttttaacattacaaataagttcttatacgttgtttatacaccgggaatcatttccattattttcgcgcaaaagtcacggatattcgtgaaagcgacataaactgcgaaatttgcggggagtgtcttgagtttgcctcgaggctagcgcatgcacatagacacacacatcatctcattgatgcttggtaataattgtcattagattgtttttatgcatagatgcactcgaaatcagccaattttagacaagtatcaaacggatgtgacttcagtacattaaaaacgtccgcaatgtgttattaagttgtctaagcgtcaatttgatttacaattgaatatatcctgccccagccagccaacagctcgatttacaattgaatatatcctgccggccggcccacgcgtgtcgaggaattctgatctggcccccatttggacgtgaatgtagacacgtcgaaataaagatttccgaattagaataatttgtttattgctttcgcctataaatacgacggatcgtaatttgtcgttttatcaaaatgtactttcattttataataacgctgcggacatctacatttttgaattgaaaaaaaattggtaattactctttctttttctccatattgaccatcatactcattgctgatccatgtagatttcccggacatgaagccatttacaattgaatatatcctgccgccgctgccgctttgcacccggtggagcttgcatgttggtttctacgcagaactgagccggttaggcagataatttccattgagaactgagccatgtgcaccttccccccaacacggtgagcgacggggcaacggagtgatccacatgggacttttaaacatcatccgtcggatggcgttgcgagagaagcagtcgatccgtgagatcagccgacgcaccgggcaggcgcgcaacacgatcgcaaagtatttgaacgcaggtacaatcgagccgacgttcacgcggaacgaccaagcaagcttggctgccatttttggggtgaggccgttcgcggccgaggggcgcagcccctggggggatgggaggcccgcgttagcgggccgggagggttcgagaagggggggcaccccccttcggcgtgcgcggtcacgcgcacagggcgcagccctggttaaaaacaaggtttataaatattggtttaaaagcaggttaaaagacaggttagcggtggccgaaaaacgggcggaaacccttgcaaatgctggattttctgcctgtggacagcccctcaaatgtcaataggtgcgcccctcatctgtcagcactctgcccctcaagtgtcaaggatcgcgcccctcatctgtcagtagtcgcgcccctcaagtgtcaataccgcagggcacttatccccaggcttgtccacatcatctgtgggaaactcgcgtaaaatcaggcgttttcgccgatttgcgaggctggccagctccacgtcgccggccgaaatcgagcctgcccctcatctgtcaacgccgcgccgggtgagtcggcccctcaagtgtcaacgtccgcccctcatctgtcagtgagggccaagttttccgcgaggtatccacaacgccggcggccgcggtgtctcgcacacggcttcgacggcgtttctggcgcgtttgcagggccatagacggccgccagcccagcggcgagggcaaccagcccggtgagcgtcggaaagggtcgacggatcttttccgctgcataaccctgcttcggggtcattatagcgattttttcggtatatccatcctttttcgcacgatatacaggattttgccaaagggttcgtgtagactttccttggtgtatccaacggcgtcagccgggcaggataggtgaagtaggcccacccgcgagcgggtgttccttcttcactgtcccttattcgcacctggcggtgctcaacgggaatcctgctctgcgaggctggccggctaccgccggcgtaacagatgagggcaagcggatggctgatgaaaccaagccaaccaggaagggcagcccacctatcaaggtgtactgccttccagacgaacgaagagcgattgaggaaaaggcggcggcggccggcatgagcctgtcggcctacctgctggccgtcggccagggctacaaaatcacgggcgtcgtggactatgagcacgtccgcgagctggcccgcatcaatggcgacctgggccgcctgggcggcctgctgaaactctggctcaccgacgacccgcgcacggcgcggttcggtgatgccacgatcctcgccctgctggcgaagatcgaagagaagcaggacgagcttggcaaggtcatgatgggcgtggtccgcccgagggcagagccatgacttttttagccgctaaaacggccggggggtgcgcgtgattgccaagcacgtccccatgcgctccatcaagaagagcgacttcgcggagctggtattcgtgcagggcaagattcggaataccaagtacgagaaggacggccagacggtctacgggaccgacttcattgccgataaggtggattatctggacaccaaggcaccaggcgggtcaaatcaggaataagggcacattgccccggcgtgagtcggggcaatcccgcaaggagggtgaatgaatcggacgtttgaccggaaggcatacaggcaagaactgatcgacgcggggttttccgccgaggatgccgaaaccatcgcaagccgcaccgtcatgcgtgcgccccgcgaaaccttccagtccgtcggctcgatggtccagcaagctacggccaagatcgagcgcgacagcgtgcaactggctccccctgccctgcccgcgccatcggccgccgtggagcgttcgcgtcgtctcgaacaggaggcggcaggtttggcgaagtcgatgaccatcgacacgcgaggaactatgacgaccaagaagcgaaaaaccgccggcgaggacctggcaaaacaggtcagcgaggccaagcaggccgcgttgctgaaacacacgaagcagcagatcaaggaaatgcagctttccttgttcgatattgcgccgtggccggacacgatgcgagcgatgccaaacgacacggcccgctctgccctgttcaccacgcgcaacaagaaaatcccgcgcgaggcgctgcaaaacaaggtcattttccacgtcaacaaggacgtgaagatcacctacaccggcgtcgagctgcgggccgacgatgacgaactggtgtggcagcaggtgttggagtacgcgaagcgcacccctatcggcgagccgatcaccttcacgttctacgagctttgccaggacctgggctggtcgatcaatggccggtattacacgaaggccgaggaatgcctgtcgcgcctacaggcgacggcgatgggcttcacgtccgaccgcgttgggcacctggaatcggtgtcgctgctgcaccgcttccgcgtcctggaccgtggcaagaaaacgtcccgttgccaggtcctgatcgacgaggaaatcgtcgtgctgtttgctggcgaccactacacgaaattcatatgggagaagtaccgcaagctgtcgccgacggcccgacggatgttcgactatttcagctcgcaccgggagccgtacccgctcaagctggaaaccttccgcctcatgtgcggatcggattccacccgcgtgaagaagtggcgcgagcaggtcggcgaagcctgcgaagagttgcgaggcagcggcctggtggaacacgcctgggtcaatgatgacctggtgcattgcaaacgctagggccttgtggggtcagttccggctgggggttcagcagccagcgctttactggcatttcaggaacaagcgggcactgctcgacgcacttgcttcgctcagtatcgctcgggacgcacggcgcgctctacgaactgccgataaacagaggattaaaattgacaattgtgattaaggctcagattcgacggcttggagcggccgacgtgcaggatttccgcgagatccgattgtcggccctgaagaaagctccagagatgttcgggtccgtttacgagcacgaggagaaaaagcccatggaggcgttcgctgaacggttgcgagatgccgtggcattcggcgcctacatcgacggcgagatcattgggctgtcggtcttcaaacaggaggacggccccaaggacgctcacaaggcgcatctgtccggcgttttcgtggagcccgaacagcgaggccgaggggtcgccggtatgctgctgcgggcgttgccggcgggtttattgctcgtgatgatcgtccgacagattccaacgggaatctggtggatgcgcatcttcatcctcggcgcacttaatatttcgctattctggagcttgttgtttatttcggtctaccgcctgccgggcggggtcgcggcgacggtaggcgctgtgcagccgctgatggtcgtgttcatctctgccgctctgctaggtagcccgatacgattgatggcggtcctgggggctatttgcggaactgcgggcgtggcgctgttggtgttgacaccaaacgcagcgctagatcctgtcggcgtcgcagcgggcctggcgggggcggtttccatggcgttcggaaccgtgctgacccgcaagtggcaacctcccgtgcctctgctcacctttaccgcctggcaactggcggccggaggacttctgctcgttccagtagctttagtgtttgatccgccaatcccgatgcctacaggaaccaatgttctcggcctggcgtggctcggcctgatcggagcgggtttaacctacttcctttggttccgggggatctcgcgactcgaacctacagttgtttccttactgggctttctcagcccccgagcgcttagtgggaatttgtaccccttatcgaaccgggagcacaggatgacgcctaacaattcattcaagccgacaccgcttcgcggcgcggcttaattcaggagttaaacatcatgagggaagcggtgatcgccgaagtatcgactcaactatcagaggtagttggcgtcatcgagcgccatctcgaaccgacgttgctggccgtacatttgtacggctccgcagtggatggcggcctgaagccacacagtgatattgatttgctggttacggtgaccgtaaggcttgatgaaacaacgcggcgagctttgatcaacgaccttttggaaacttcggcttcccctggagagagcgagattctccgcgctgtagaagtcaccattgttgtgcacgacgacatcattccgtggcgttatccagctaagcgcgaactgcaatttggagaatggcagcgcaatgacattcttgcaggtatcttcgagccagccacgatcgacattgatctggctatcttgctgacaaaagcaagagaacatagcgttgccttggtaggtccagcggcggaggaactctttgatccggttcctgaacaggatctatttgaggcgctaaatgaaaccttaacgctatggaactcgccgcccgactgggctggcgatgagcgaaatgtagtgcttacgttgtcccgcatttggtacagcgcagtaaccggcaaaatcgcgccgaaggatgtcgctgccgactgggcaatggagcgcctgccggcccagtatcagcccgtcatacttgaagctaggcaggcttatcttggacaagaagatcgcttggcctcgcgcgcagatcagttggaagaatttgttcactacgtgaaaggcgagatcaccaaggtagtcggcaaataatgtctaacaattcgttcaagccgacgccgcttcgcggcgcggcttaactcaagcgttagagagctggggaagactatgcgcgatctgttgaaggtggttctaagcctcgtcttgcgatggcatttcgatccattcccattccgcgctcaagatggcttcccctcggcagttcatcagggctaaatcaatctagccgacttgtccggtgaaatgggctgcactccaacagaaacaatcaaacaaacatacacagcgacttattcacacgagctcaaattacaacggtatatatcctgccagtcagcatcatcacaccaaaagttaggcccgaatagtttgaaattagaaagctcgcaattgaggtctacaggccaaattcgctcttagccgtacaatattactcaccggatcctaaccggtttaattaaggcgcgccatgcccgggcaagcggccgcacaagttt

SEQ ID NO: 45 - DNA, 46978 bp, Artificial sequence
  plasmid pDAB9330
gtacaaaaaagcaggcttctagacctaggtggagtcatcacgcagactatctcagcatgtgcgtagcacgcggccgcctcccagtatcattatagtgaaagttttggctctctcgccggtggttttttacctctatttaaaggggttttccacctaaaaattctggtatcattctcactttacttgttactttaatttctcataatctttggttgaaattatcacgcttccgcacacgatatccctacaaatttattatttgttaaacattttcaaaccgcataaaattttatgaagtcccgtctatctttaatgtagtctaacattttcatattgaaatatataatttacttaattttagcgttggtagaaagcataatgatttattcttattcttcttcatataaatgtttaatatacaatataaacaaattctttaccttaagaaggatttcccattttatattttaaaaatatatttatcaaatatttttcaaccacgtaaatctcataataataagttgtttcaaaagtaataaaatttaactccataatttttttattcgactgatcttaaagcaacacccagtgacacaactagccatttttttctttgaataaaaaaatccaattatcattgtattttttttatacaatgaaaatttcaccaaacaatgatttgtggtatttctgaagcaagtcatgttatgcaaaattctataattcccatttgacactacggaagtaactgaagatctgcttttacatgcgagacacatcttctaaagtaattttaataatagttactatattcaagatttcatatatcaaatactcaatattacttctaaaaaattaattagatataattaaaatattacttttttaattttaagtttaattgttgaatttgtgactattgatttattattctactatgtttaaattgttttatagatagtttaaagtaaatataagtaatgtagtagagtgttagagtgttaccctaaaccataaactataagatttatggtggactaattttcatatatttcttattgcttttaccttttcttggtatgtaagtccgtaactggaattactgtgggttgccatgacactctgtggtcttttggttcatgcatggatcttgcgcaagaaaaagacaaagaacaaagaaaaaagacaaaacagagagacaaaacgcaatcacacaaccaactcaaattagtcactggctgatcaagatcgccgcgtccatgtatgtctaaatgccatgcaaagcaacacgtgcttaacatgcactttaaatggctcacccatctcaacccacacacaaacacattgcctttttcttcatcatcaccacaaccacctgtatatattcattctcttccgccacctcaatttcttcacttcaacacacgtcaacctgcatatgcgtgtcatcccatgcccaaatctccatgcatgttccaaccaccttctctcttatataatacctataaatacctctaatatcactcacttctttcatcatccatccatccagagtactactactctactactataataccccaacccaactcatattcaatactactctaggatccacaaccaaaaatggcagcgaggctgcaagagcagaaaggaggtgagatggacacgaggattgcgatcataggcatgagcgccatacttccttgtggaaccacggtgagagagtcatgggagaccataagggctggcattgattgcctgtctgatcttcctgaggatcgtgttgatgtgactgcgtactttgacccagtcaagaccacaaaggacaaaatctactgcaagagaggaggtttcattcctgagtatgactttgatgcgcgtgagtttggtctcaacatgttccagatggaagattctgatgcgaatcagaccatctcacttctcaaggtcaaagaagcacttcaagatgctgggattgatgcacttggaaaggagaagaaaaacataggatgcgtgcttggcattggaggtggacagaagagttcacatgagttctacagcagactcaactatgtggttgtggagaaagtcttgagaaagatggggatgccagaggaagatgtcaaagtggctgtggagaagtacaaagcgaacttcccagaatggagacttgactctttccctggattccttgggaatgtcactgctggcagatgcaccaacacattcaacttggatggcatgaactgcgttgtggatgctgcatgtgcaagctccttgatagcagtcaaggttgcgattgatgaactgctctatggtgactgcgacatgatggtcactggtgcaacctgcacagacaactccattgggatgtacatggctttctcaaagacacctgtgttcagcacggacccaagtgtgagagcgtatgatgagaaaacgaaagggatgctcattggtgagggatcagccatgttggtgctcaaacgttatgcagatgcagtgagggatggtgatgagattcatgctgtgattcgtggttgtgcaagctcaagtgatggcaaagcagctggcatctacactcccacaatcagtggtcaagaggaagccttgagacgtgcatacaatcgtgcctgcgttgaccctgccactgtcactttggttgagggtcatgggactggcactccagttggagataggattgagttgactgcgttgaggaacttgtttgacaaagcgtatggtgaagggaacacagagaaagttgcagttggaagtatcaagtccagtattggtcatttgaaggctgttgctggtcttgctggaatgatcaaggtcatcatggctctcaaacacaagactttgcctggaacgatcaatgtggacaatccacccaatctctatgacaacactcccatcaatgagtcatccctctacatcaacacgatgaacagaccctggttccctccacctggtgttccgagacgtgctggaatatccagctttggctttggaggtgccaactaccatgcagtgttggaagaggctgaaccagagcacacgacagcgtacagactcaacaaacgtccacaaccggtgttgatgatggctgcaactcctgctgcgttgcagagcctttgtgaagctcagctgaaagagtttgaagctgcgatcaaggagaatgagacagtcaagaatactgcctacatcaagtgtgtcaagtttggagaacagttcaagttccctgggagcatacctgcgaccaatgcgagactgggattcttggtcaaagatgcggaggatgcgtgctccacgcttcgtgctatatgtgctcagtttgccaaagatgtgaccaaagaagcgtggaggcttccgagagaaggagtttctttccgtgccaaaggcattgccaccaatggtgctgttgctgcactcttctctggacaaggtgctcagtacacacacatgttcagtgaagttgcgatgaactggcctcagttcagacagtccattgctgcaatggacgctgcacagtccaaggttgctggaagtgacaaagactttgaaagagtctctcaagtcctgtacccaaggaaaccgtacgaacgtgagccagaacaagatcacaagaaaatctcactcacagcatacagccagccgtcaaccctggcatgtgctcttggtgcctttgagattttcaaggaagctggattcactccagactttgcagctggacacagcttgggtgagtttgctgcgctctatgcagctggttgtgttgacagagatgagttgtttgaacttgtttgcagaagggcaaggatcatgggaggcaaagatgcacctgccacacccaaaggttgcatggcagctgtcataggacccaacgcagagaacatcaaggttcaagctgccaacgtctggcttggaaactcaaactctccgtctcagactgtcattactgggtctgttgaagggattcaagctgaaagtgccagattgcagaaggaagggttcagagttgtgcctcttgcttgtgagtctgccttccattctccacagatggaaaatgccagctcagctttcaaagatgtcatatccaaggtttccttccgtacacccaaagcagaaacaaagctcttcagcaatgtttctggagagacctatccgacggatgccagagagatgctcactcaacacatgacctcatctgtgaagttcctgacccaagtgaggaacatgcaccaagctggtgcgagaatctttgttgagtttggaccgaaacaagttctcagcaaacttgtttctgaaaccctcaaagatgacccgtctgttgtcacagtgtctgtgaacccagcttctggcacggactctgacatacagttgagggatgctgcagttcagctggttgtggctggtgtcaatcttcaagggtttgacaagtgggatgctcctgatgccacgaggatgcaagccatcaagaaaaagagaaccacactcagactttcagctgccacctatgtcagtgacaagaccaagaaagtgagggatgctgccatgaacgacggaagatgtgtcacatacctcaagggtgctgcaccactcatcaaggctcctgaacctgtggttgacgaagctgccaagagggaggctgaaaggcttcagaaggagcttcaagacgctcagaggcagcttgacgacgccaaacgtgcagctgcagaagccaactccaaacttgctgctgccaaggaggaagccaagactgctgcagcttcagccaagcctgcagttgacactgctgttgtggagaaacatcgtgccatcctcaagtccatgctggctgagctggatggttatggaagtgttgatgcttcttcccttcagcaacagcaacagcaacagactgctccggcgcctgttaaagccgctgcccctgccgctcccgttgcaagtgctcctgctcccgccgtgtccaacgagttgcttgagaaagctgagacagttgtgatggaggttctcgctgccaagactggatacgaaacagacatgattgaggcggacatggagcttgagactgagttgggaattgacagcatcaagagggttgaaattctttctgaagtccaagctatgcttaacgttgaggcgaaagatgttgatgctctctctaggacgagaacagtgggtgaagttgtcaacgctatgaaggcagaaatcgctggttcttccgctccggcgccggcagctgccgcacctgcaccggctaaagcggctccagctgcagctgcaccagctgtttctaatgagctgctcgaaaaggcagaaactgttgtgatggaagtccttgctgccaaaactggctacgaaactgacatgatagaatcagacatggagcttgagacggagcttggaattgattccatcaagcgtgtggaaatcctcagtgaagtccaagccatgctcaatgtggaagctaaggatgtggatgctctctcaaggaccagaactgtcggtgaggttgtcaatgccatgaaggctgagatagctggaggctccgctcctgcgccggccgctgccgctcctggtcccgctgccgcggctccagctccagctgcagccgctccggccgtctcaaacgaactccttgaaaaagctgagaccgtcgtgatggaggtcttggcagctaaaaccggctatgagactgacatgattgagtctgacatggaattggagacagaacttgggatagacagcatcaaacgtgttgaaatcctcagtgaggtccaagctatgctgaacgtggaagcgaaggatgttgatgctctgtccagaacgaggaccgttggtgaggttgtggatgccatgaaggctgaaattgctggagggtctgcgcccgcgccagctgcagccgctcctgcacccgcagccgcggcacctgctccagctgcacctgcacctgccgtttcttcagaactcttggagaaggctgagacggttgtgatggaggttttggctgcaaagactggctatgagaccgacatgattgaatctgatatggaattggagacagagcttgggatcgattccatcaaaagagtggagatcctgagtgaagtccaagccatgctcaatgttgaagctaaggatgttgatgcactttcaagaacaaggacagtgggtgaggttgtggatgccatgaaggcggagattgctggagggagcgcgcctgcgccagctgccgcggcacctgcaccggcagccgcagctccagctccagctgcaccagcaccggccgcgcccgcgccagctgtttcatccgaactcctggaaaaggccgagacggttgtgatggaggtgctcgcagctaagactggttacgagaccgacatgattgaaagtgacatggagcttgaaaccgagttgggaatagatagcatcaaacgtgttgaaatcttgtctgaggtccaagctatgttgaacgtggaggcaaaagatgtcgatgcgctttcaagaaccagaacagtcggtgaggtcgtggacgccatgaaggctgaaattgccggaagctctgctagtgcgccagctgcagccgcacctgcacctgctgccgcggcacctgctccagctgcagccgctcctgccgtcagcaatgagttgctggagaaagccgaaacagttgtgatggaagtccttgctgcaaaaactggttacgaaacggacatgattgagtcagacatggaattggagaccgaacttggaatagattccatcaagagagtggagatcctctctgaggtgcaagccatgctcaacgttgaggctaaagatgttgatgcactcagtaggacaagaactgtgggggaagttgtcgatgcgatgaaggctgagattgctggaggctctgctcctgcgccggcagctgccgcacctgcacccgcagccgcggcaccagctgtcagcaacgaattgcttgagaaggctgaaacagttgtcatggaagtgctggctgcaaaaaccggctatgagactgacatgattgagtctgacatggaacttgagacggaattgggcattgacagcatcaagcgtgttgagatcctcagtgaagtccaagcaatgctcaatgtggaggctaaggatgtggatgccctctcaaggaccagaacagttggtgaggtcgttgatgcgatgaaggcggagatcgctggaagttccgcgcctgcgccagctgcagccgctcctgcacccgcagccgcggcaccggctccagctgcagccgcaccggccgtctcctcagaactcctggaaaaggctgagacagttgtgatggaagtccttgctgcgaaaactggctatgagaccgacatgattgaatctgacatggaactggagaccgagcttggaattgactccatcaaacgtgttgaaatcctctctgaggttcaagcgatgttgaatgtggaggccaaagatgttgatgctctttccagaacaaggacggtgggagaggtggttgatgccatgaaggctgagatagctgggggttctgctcctgcgccagctgcagccgctcctgctcccgctgccgcggcaccagctgtcagcaacgaactccttgaaaaagctgaaactgttgtgatggaggttttggctgcaaagactggatacgagactgacatgatagagtcagacatggagttggaaacagagcttgggattgatagcatcaagcgtgtggaaatcctttctgaggttcaagccatgctgaacgttgaggccaaagatgtcgatgctttgtcaaggaccagaacggttggagaagtggtcgatgccatgaaggctgagatagctggtggatcagcccctgctccggctgcagccgctcctgcaagtgccggtgctgcaccagctgtgaagattgattcagttcatggtgctgactgtgacgatttgtcactgatgcacgcaaaggtggttgacatcagaaggccagatgaactgattctggaaagaccggagaaccgtccagttcttgtcgttgacgatggctcagagttgacacttgctcttgtgagggtgttgggagcctgtgcagttgtcttgacctttgagggattgcagttggctcagagagctggtgcagctgccattcgtcatgttctggctaaggacctttcagcagaatcagctgagaaggccatcaaagaggctgagcaaagatttggagcgttgggaggcttcataagccagcaagcagaaaggtttgaaccagctgagatactgggtttcacactcatgtgtgcgaagtttgccaaagcctctctctgcactgctgtggctggaggtcgtcctgccttcatcggtgtggctaggcttgacggcagacttggattcacctctcaaggcacttctgacgcactcaagagagcacagcgtggagcgatctttggactctgcaagacaatagggttggagtggtcagaatctgatgtgttcagccgtggtgtggacattgctcaagggatgcacccagaagatgctgcagttgccatagttagggagatggcgtgtgctgacatcagaatcagagaggttgggattggagcaaaccagcaaagatgcacaatcagagctgccaagttggagactgggaaccctcagagacagatagcgaaagacgatgtgcttctggtttctggaggtgctcgtgggatcacacctctttgcatccgtgagatcacgcgtcagattgctggaggcaagtacattctgttgggtcgtagcaaagtttctgcgtctgaaccagcatggtgtgctggcatcactgatgagaaggctgtgcagaaagctgccacccaagagttgaagagggccttcagtgctggtgaaggacccaaacccactccaagggctgtcacgaaacttgtgggatctgttcttggtgctcgtgaagtgagaagctccattgctgccattgaagctctgggtggcaaagcgatctacagctcttgtgatgtgaactctgctgcagatgttgccaaagcagttagggatgcagagtcccagcttggtgccagagttagtggaatcgttcacgcttctggtgtgctccgtgatcgtctcatagagaagaaactccctgacgagtttgatgctgtctttgggaccaaagtcactgggttggagaatcttctggctgcagttgatcgtgccaacctcaaacacatggttctcttcagctcccttgctggtttccacggcaatgttggtcagtctgactatgcgatggcaaacgaagctctcaacaagatgggtttggaacttgcgaaggatgtcagtgtcaagtccatctgctttggtccctgggatggtgggatggtgacacctcaactcaagaaacagtttcaagaaatgggagttcagatcattcctcgtgaaggaggtgctgatacagttgcgaggattgtgttgggatcaagtcctgctgagatccttgttggaaactggaggacaccatccaagaaagttggaagtgacacgatcaccctgcatagaaagatcagtgccaagtccaatcccttcttggaggatcatgtcatacaaggcagaagggtgttgccaatgacccttgctattgggagccttgctgagacctgccttggactcttccctggctactctctctgggccatagatgacgcacagctcttcaaaggtgtcactgttgatggagacgtcaactgtgaagtgaccctcacaccgtccactgctccgagtgggagggtgaatgtccaagcgacgctcaagacgttctcaagtggaaaacttgttccagcctacagagctgtcatagtgttgtccaaccaaggtgctccacctgccaatgcaaccatgcagcctccgagccttgatgcagatcctgctttgcaagggtcagtctatgatggcaagactctctttcatggtcctgcgttcagaggcattgatgacgttctcagctgcaccaagagccagcttgttgccaagtgttctgctgttcctggatcagatgcagccagaggagagtttgcaactgacactgatgcacatgatccctttgtcaatgatcttgcctttcaagcaatgttggtctgggtgaggagaacgctgggacaagctgcactcccgaactccattcagaggatagtccaacacagaccggtcccacaagacaaacccttctacatcaccctcagatccaatcagagtggtggacatagccagcacaaacatgcacttcagttccacaacgaacaaggtgatctcttcattgatgttcaagcctctgtcattgcgacagactcacttgcgttctgagtagttagcttaatcacttaggtcaccagtatgaactaaaatgcatgtaggtgtaagagctcatggagagcatggaatattgtatccgaccatgtaacagtataataactgagctccatctcacttcttctatgaataaacaaaggatgttatgatatattaacactctatctatgcaccttattgttctatgataaatttcctcttattattataaatcatctgaatcgtgacggcttatggaatgcttcaaatagtacaaaaacaaatgtgtactataagactttctaaacaattctaactttagcattgtgaacgagacataagtgttaagaagacataacaattataatggaagaagtttgtctccatttatatattatatattacccacttatgtattatattaggatgttaaggagacataacaattataaagagagaagtttgtatccatttatatattatatactacccatttatatattatacttatccacttatttaatgtctttataaggtttgatccatgatatttctaatattttagttgatatgtatatgaaaaggtactatttgaactctcttactctgtataaaggttggatcatccttaaagtgggtctatttaattttattgcttcttacagataaaaaaaaaattatgagttggtttgataaaatattgaaggatttaaaataataataaataataaataacatataatatatgtatataaatttattataatataacatttatctataaaaaagtaaatattgtcataaatctatacaatcgtttagccttgctggaacgaatctcaattatttaaacgagagtaaacatatttgactttttggttatttaacaaattattatttaacactatatgaaattttttttttttatcagcaaagaataaaattaaattaagaaggacaatggtgtcccaatccttatacaaccaacttccacaagaaagtcaagtcagagacaacaaaaaaacaagcaaaggaaattttttaatttgagttgtcttgtttgctgcataatttatgcagtaaaacactacacataacccttttagcagtagagcaatggttgaccgtgtgcttagcttcttttattttatttttttatcagcaaagaataaataaaataaaatgagacacttcagggatgtttcaacccttatacaaaaccccaaaaacaagtttcctagcaccctaccaacgaattcgcggccgcttaattaagatgagtgatactcaggactcaggactcactctgctgatcactagtgctagcctcgaggtcgacacaactttgtatacaaaagttgtctagacctaggctcagcaactcatccagtcaagttcgagtcagtgagttgggcggccgcctcccagtatcattatagtgaaagttttggctctctcgccggtggttttttacctctatttaaaggggttttccacctaaaaattctggtatcattctcactttacttgttactttaatttctcataatctttggttgaaattatcacgcttccgcacacgatatccctacaaatttattatttgttaaacattttcaaaccgcataaaattttatgaagtcccgtctatctttaatgtagtctaacattttcatattgaaatatataatttacttaattttagcgttggtagaaagcataatgatttattcttattcttcttcatataaatgtttaatatacaatataaacaaattctttaccttaagaaggatttcccattttatattttaaaaatatatttatcaaatatttttcaaccacgtaaatctcataataataagttgtttcaaaagtaataaaatttaactccataatttttttattcgactgatcttaaagcaacacccagtgacacaactagccatttttttctttgaataaaaaaatccaattatcattgtattttttttatacaatgaaaatttcaccaaacaatgatttgtggtatttctgaagcaagtcatgttatgcaaaattctataattcccatttgacactacggaagtaactgaagatctgcttttacatgcgagacacatcttctaaagtaattttaataatagttactatattcaagatttcatatatcaaatactcaatattacttctaaaaaattaattagatataattaaaatattacttttttaattttaagtttaattgttgaatttgtgactattgatttattattctactatgtttaaattgttttatagatagtttaaagtaaatataagtaatgtagtagagtgttagagtgttaccctaaaccataaactataagatttatggtggactaattttcatatatttcttattgcttttaccttttcttggtatgtaagtccgtaactggaattactgtgggttgccatgacactctgtggtcttttggttcatgcatggatcttgcgcaagaaaaagacaaagaacaaagaaaaaagacaaaacagagagacaaaacgcaatcacacaaccaactcaaattagtcactggctgatcaagatcgccgcgtccatgtatgtctaaatgccatgcaaagcaacacgtgcttaacatgcactttaaatggctcacccatctcaacccacacacaaacacattgcctttttcttcatcatcaccacaaccacctgtatatattcattctcttccgccacctcaatttcttcacttcaacacacgtcaacctgcatatgcgtgtcatcccatgcccaaatctccatgcatgttccaaccaccttctctcttatataatacctataaatacctctaatatcactcacttctttcatcatccatccatccagagtactactactctactactataataccccaacccaactcatattcaatactactctaggatccacaaccaaaaatggctgcaaggaacgtgagtgcggctcatgagatgcatgacgagaagaggatagctgttgtgggcatggctgttcagtatgctggatgcaaaacgaaagacgagttctgggaagttctcatgaatggaaaagttgagagcaaagtgatcagcgacaaacgtcttggttcaaattaccgtgctgaacactacaaagctgaaaggagcaagtatgctgacaccttctgcaatgagacatatggaactcttgatgagaacgaaatagacaatgagcatgaactccttttgaaccttgccaaacaagccttggctgaaacatctgtcaaagattcaacaagatgtggcatagtttctggatgcctcagcttcccgatggacaacctccaaggtgaactcttgaatgtgtaccagaaccatgttgagaagaaacttggtgccagagttttcaaagatgcctctcactggtcagaaagagaacagtccaacaaaccagaggctggtgacagaagaatcttcatggaccctgcttcctttgttgctgaggaactcaatcttggcgctctccactactctgttgatgctgcctgtgccactgcgctctatgtgctcagactggcgcaagatcacttggtctctggtgcagctgatgtgatgctttgtggtgcaacatgcctgccggagccgtttttcatactctctgggttctcaaccttccaagccatgcctgttggaacgggtcagaatgtgtccatgccgctgcacaaagattctcaaggattgacccctggtgaaggaggttccatcatggtcctcaaacgtttggatgacgcaatcagagatggagatcacatctatggaacacttttgggagccaatgtcagcaacagtggcactggtctgccacttaaaccccttttgccgtcagagaaaaagtgcctcatggacacctacacacgtatcaatgtgcatccccacaagattcagtatgttgaatgccatgcaactgggactccacaaggtgatcgtgtggaaattgatgctgtgaaggcttgctttgaaggcaaagtcccacgttttggaaccacaaaagggaactttggacacacattggtggcagctgggtttgctggcatgtgcaaagtgcttctctccatgaagcacgggatcattccacccactccgggaatagatgacgaaacgaagatggaccctctggttgtctctggtgaggccattccctggccagaaacgaatggagaaccgaagcgtgctggtctctcagcgtttggatttggtgggaccaatgctcatgctgtctttgaggaacatgacccaagcaatgctgcatgcactggccatgactccatttctgctctctctgcacgttgtggtggtgagtcaaacatgagaatagcaatcactgggatggatgccacttttggtgctttgaaaggattggatgcttttgaaagggccatctacactggtgctcatggtgctataccactcccagaaaagagatggagattcctggggaaagacaaggacttccttgatctttgtggagtcaaagcaacaccgcatggctgttacattgaagatgttgaagttgatttccagaggctgaggactccaatgactcctgaagatatgctcttgcctcaacagcttctggctgtcaccacaattgatagggccatattggactctggcatgaagaaaggtggaaatgtggctgtctttgtggggttggggaccgatcttgaactctaccgtcaccgtgcaagggttgctctcaaggagagagtgaggcctgaagccagcaagaaactcaatgacatgatgcagtacatcaatgattgtgggacaagcacttcttacaccagctacataggcaacttggttgcaacaagggtcagttcacaatggggcttcacgggaccttccttcacaatcacagaaggcaacaattctgtgtacagatgtgctgaacttggcaaatacctcttggaaacgggagaggttgatggggttgtggttgcgggtgttgatctctgtgggagtgctgagaacctttacgtcaagtcaaggcgtttcaaggtgtctacatctgacaccccgagagccagctttgatgcagctgctgatggttactttgttggagagggctgtggtgcatttgtgctcaagcgtgagacaagctgcaccaaggatgacagaatctatgcttgcatggatgccatagttcctggaaatgttccatctgcatgtttgagagaggcattggatcaagccagagtcaagcctggagacatcgagatgttggagctttctgctgattcagcgaggcatttgaaggacccgtctgttctcccaaaggaactcactgctgaggaagagattggcggacttcagacgattcttcgtgacgatgacaagctcccaaggaatgttgcaactggaagtgtcaaggccactgttggtgacactggttatgcttctggtgctgccagtttgattaaggctgcgctttgcatctacaaccgttacctgcccagcaatggagatgactgggatgaacctgcacctgaagcaccctgggacagcacactctttgcgtgccagacctcaagagcttggttgaagaaccctggtgagagacgttatgcggctgtttccggagtcagtgaaaccagaagttgctacagtgtgctgctttctgaagcagagggacactacgagagagagaacagaatcagtttggatgaggaagcacccaagctcattgtgttgagagcagactcccatgaagagattcttggaagattggacaagataagggaaaggttcttgcagcccacgggtgctgcacccagagagtctgaattgaaggcgcaagcccgtaggatctttcttgaactccttggtgagacccttgcccaagatgcagcttcatctggaagtcagaagccccttgctctcagcttggtctccactccatccaagctccagagagaggtggaacttgcggcaaaaggcattccgagatgtctcaagatgagacgtgattggagttcccctgctggaagcagatatgcgcctgagcctttggccagtgacagagttgccttcatgtatggagaaggaaggagcccttactatggcatcacacaagacattcataggatttggcctgaacttcatgaggtcatcaatgagaaaacaaaccgtctctgggctgaaggtgacagatgggtcatgccaagggccagcttcaagagtgagcttgagtcacaacagcaagagtttgacagaaacatgattgaaatgttccgtcttggaatcctcacctcaattgccttcacaaacctggcgagagatgttctcaacatcacgcccaaagcagcctttggactcagtttgggagagatttccatgatctttgctttctccaagaaaaacggtttgataagcgatcagttgacaaaggatttgagagagtcagatgtctggaacaaagctctggctgttgagttcaatgcgctcagagaagcctggggcattccacagtctgtcccaaaagatgagttctggcaaggttacatagtgaggggaacgaaacaagacatagaagcagccatagcaccagactcaaagtatgtgaggttgaccatcatcaatgatgccaacactgctctcatcagtggaaagcctgatgcatgcaaagctgcgattgctcgtcttggtggcaacatccctgcgcttccagtcactcaaggcatgtgtgggcattgcccagaggtgggaccttacaccaaggacatcgcaaagatccacgccaaccttgagttccctgtggttgatggtcttgatctctggactaccataaaccagaagaggcttgtgccaagagccacgggtgccaaagatgaatgggctccttcatcctttggggagtatgctggacagctctatgagaaacaagccaacttccctcagatagttgaaaccatctacaagcagaactatgatgtgtttgttgaagttgggccaaacaatcacagaagcacagcagtgagaaccacgcttggaccacagagaaaccaccttgctggtgccatagacaagcagaacgaggatgcttggacgacaatagtcaagctcgtggcttcattgaaggctcaccttgttcctggagtgaccatcagtccgctctaccactccaagctcgttgcagaggctgaggcttgttatgctgcgctctgtaaaggtgagaaacccaagaaaaacaagtttgtgagaaagattcagttgaatggcagattcaacagcaaggcagaccccatctcctcagcagaccttgcatccttcccacctgcggaccctgcgattgaagctgccatctcttcaaggatcatgaagcctgtggctccgaaattctatgcgcgtctcaacattgatgagcaagatgagaccagagatccgatcttgaacaaggacaatgcgccttccagctccagctcttccagcagttcctcttccagcagttcatctccgtctcctgctccttcagctccagttcagaagaaagctgccccagctgcggagacaaaagctgttgccagtgctgatgcacttcgtagtgccctgcttgatcttgactccatgcttgcgctcagctctgcaagtgcttctggcaaccttgttgagactgcgccatctgatgccagtgtcattgtccctccgtgcaacattgctgatcttggcagcagagctttcatgaaaacttatggtgtttctgcgcctctgtacaccggtgcaatggccaagggaattgcctctgcggacttggtgatcgcagctggaaggcaaggaatccttgcgtcatttggtgctggaggccttccaatgcaagttgtgcgtgagtccattgaaaagattcaagctgccctgcccaatggaccatatgctgtcaacctcatccattctccttttgacagcaaccttgagaagggaaatgttgatctcttcttggaaaagggtgtcacttttgttgaggcttcagccttcatgacgttgacaccgcaagttgtcagatacagagcggctgggttgacgaggaatgcagatgggtcagtcaacataaggaacagaatcattgggaaagtctccagaactgagctggctgaaatgttcatgcgtcctgcacctgagcatcttttgcagaagctcattgcttctggggagatcaatcaagaacaagctgagttggccagacgtgttcctgtggctgatgacattgcggttgaagctgattctggtggacacactgacaaccgtccaatccatgtcattctgcctctgattatcaacctgagggataggcttcacagagagtgtggatacccagcaaacctgagggttcgtgttggtgctgggggtggcattgggtgtccccaagctgcgctggcaactttcaacatgggtgcctctttcattgtcactggaacagtgaaccaagttgccaaacaatctgggacgtgtgacaatgtgaggaaacagcttgcgaaagcaacttactcagatgtttgcatggcaccggcagctgacatgtttgaggaaggtgtgaaacttcaagttttgaagaaaggaacaatgttcccttcaagagccaacaaactctatgagttgttctgcaagtatgattcttttgagtccatgcctccagcagagcttgcgagggttgagaaaagaatcttcagtcgtgcattggaagaggtctgggatgagaccaagaacttctacatcaaccgtctccacaacccagagaagatacagagggctgagagggaccccaaactgaagatgtcactgtgtttcagatggtatctgtccctggcttcaaggtgggccaacactggagcttctgacagagtcatggactaccaagtttggtgtggtcctgccattggttcattcaatgatttcatcaaaggaacttaccttgatccggcagtggcaaatgagtacccgtgtgttgtgcagatcaacaaacagattcttagaggagcgtgcttcttgaggcgtcttgaaatactgagaaatgcaaggctttcagatggtgcagctgcacttgtggcgagcattgatgacacatatgtccctgctgagaagctgtgagtagttagcttaatcacttaggtcaccagtatgaactaaaatgcatgtaggtgtaagagctcatggagagcatggaatattgtatccgaccatgtaacagtataataactgagctccatctcacttcttctatgaataaacaaaggatgttatgatatattaacactctatctatgcaccttattgttctatgataaatttcctcttattattataaatcatctgaatcgtgacggcttatggaatgcttcaaatagtacaaaaacaaatgtgtactataagactttctaaacaattctaactttagcattgtgaacgagacataagtgttaagaagacataacaattataatggaagaagtttgtctccatttatatattatatattacccacttatgtattatattaggatgttaaggagacataacaattataaagagagaagtttgtatccatttatatattatatactacccatttatatattatacttatccacttatttaatgtctttataaggtttgatccatgatatttctaatattttagttgatatgtatatgaaaaggtactatttgaactctcttactctgtataaaggttggatcatccttaaagtgggtctatttaattttattgcttcttacagataaaaaaaaaattatgagttggtttgataaaatattgaaggatttaaaataataataaataataaataacatataatatatgtatataaatttattataatataacatttatctataaaaaagtaaatattgtcataaatctatacaatcgtttagccttgctggaacgaatctcaattatttaaacgagagtaaacatatttgactttttggttatttaacaaattattatttaacactatatgaaattttttttttttatcagcaaagaataaaattaaattaagaaggacaatggtgtcccaatccttatacaaccaacttccacaagaaagtcaagtcagagacaacaaaaaaacaagcaaaggaaattttttaatttgagttgtcttgtttgctgcataatttatgcagtaaaacactacacataacccttttagcagtagagcaatggttgaccgtgtgcttagcttcttttattttatttttttatcagcaaagaataaataaaataaaatgagacacttcagggatgtttcaacccttatacaaaaccccaaaaacaagtttcctagcaccctaccaacgaattcgcggccgcttaattaatctgacctgaccactagacctgagtgagtacagatgtgctactagtgctagcctcgaggtcgaccaacttttctatacaaagttgtctagacctaggactaggcactgagtgactcactgacctgactgagtgactggcggccgcctcccagtatcattatagtgaaagttttggctctctcgccggtggttttttacctctatttaaaggggttttccacctaaaaattctggtatcattctcactttacttgttactttaatttctcataatctttggttgaaattatcacgcttccgcacacgatatccctacaaatttattatttgttaaacattttcaaaccgcataaaattttatgaagtcccgtctatctttaatgtagtctaacattttcatattgaaatatataatttacttaattttagcgttggtagaaagcataatgatttattcttattcttcttcatataaatgtttaatatacaatataaacaaattctttaccttaagaaggatttcccattttatattttaaaaatatatttatcaaatatttttcaaccacgtaaatctcataataataagttgtttcaaaagtaataaaatttaactccataatttttttattcgactgatcttaaagcaacacccagtgacacaactagccatttttttctttgaataaaaaaatccaattatcattgtattttttttatacaatgaaaatttcaccaaacaatgatttgtggtatttctgaagcaagtcatgttatgcaaaattctataattcccatttgacactacggaagtaactgaagatctgcttttacatgcgagacacatcttctaaagtaattttaataatagttactatattcaagatttcatatatcaaatactcaatattacttctaaaaaattaattagatataattaaaatattacttttttaattttaagtttaattgttgaatttgtgactattgatttattattctactatgtttaaattgttttatagatagtttaaagtaaatataagtaatgtagtagagtgttagagtgttaccctaaaccataaactataagatttatggtggactaattttcatatatttcttattgcttttaccttttcttggtatgtaagtccgtaactggaattactgtgggttgccatgacactctgtggtcttttggttcatgcatggatcttgcgcaagaaaaagacaaagaacaaagaaaaaagacaaaacagagagacaaaacgcaatcacacaaccaactcaaattagtcactggctgatcaagatcgccgcgtccatgtatgtctaaatgccatgcaaagcaacacgtgcttaacatgcactttaaatggctcacccatctcaacccacacacaaacacattgcctttttcttcatcatcaccacaaccacctgtatatattcattctcttccgccacctcaatttcttcacttcaacacacgtcaacctgcatatgcgtgtcatcccatgcccaaatctccatgcatgttccaaccaccttctctcttatataatacctataaatacctctaatatcactcacttctttcatcatccatccatccagagtactactactctactactataataccccaacccaactcatattcaatactactctaggatccacaaccaaaaatggcgcttcgtgtcaagaccaacaagaagccatgttgggagatgaccaaggaggaactgacctctggcaaaactgaggtgttcaactatgaggaactcctggagtttgcagagggtgacatagctaaggtttttggtccggagtttgctgtcatagacaagtaccccagaagggtgaggctgcctgctcgtgaatacctgcttgtgacaagggtcacactcatggatgccgaggtcaacaactacagagttggtgccagaatggtcactgagtatgatcttccagtgaatggcgaattgtctgagggaggtgattgtccctgggcagttctggttgagagtggacagtgcgatttgatgctgatatcatacatgggaattgatttccagaaccaaggtgacagagtttaccgtctgctcaacaccacgttgacattctatggggttgcccatgagggagagacccttgagtatgacatcagagtgaccggttttgccaaacgtttggatggtggcatctccatgttcttctttgagtatgactgctatgtcaatgggaggcttctcattgagatgagagatggctgtgctggcttcttcacaaatgaggagcttgatgcgggaaagggtgtggtgttcacaagaggggatttggctgccagagctaagattccaaagcaagatgtttctccctatgctgtcgctccctgccttcacaaaacaaaactcaacgaaaaggagatgcagaccttggttgacaaagattgggcttccgtttttggctcaaagaatggcatgccggagatcaactacaaactctgcgcacgtaagatgctcatgattgatagagtcaccagcattgaccataagggaggtgtgtacggtttgggtcagttggttggtgagaaaatcttggagagggaccattggtacttcccatgccattttgttaaggatcaagtcatggctggatctcttgtcagcgacggttgttcacaaatgctcaagatgtacatgatctggctcggtttgcaccttaccaccggaccatttgacttcagacccgtcaacggacacccgaacaaagttaggtgtaggggtcagatatctcctcataagggaaagttggtctacgtcatggagatcaaagagatgggattcgacgaggataacgatccgtacgccattgctgacgtcaacatcattgacgttgatttcgaaaagggtcaagatttcagccttgatagaatcagcgactacggaaagggggatcttaacaaaaagatcgtcgtggacttcaagggcattgctctcaagatgcagaagagatccacgaacaagaacccctccaaagttcagcccgtttttgctaacggtgcagccactgtgggaccggaagcgtccaaggccagctctggtgccagtgctagtgcttctgctgcccctgcgaagcctgctttctcagcagatgttcttgcgccaaagccagttgcacttcctgaacatatcctcaagggtgacgctctcgctccgaaagaaatgtcctggcatcccatgtcaaaacttcctggcaacccgacgccgttcttctcccctagttcttaccctccgagggcaatttgcttcatccctttccctggcaacccacttgacaacaattgcaaagctggagaaatgcctctgaactggtacaacatgtcagagttcatgtgtggaaaagttagcaactgcttgggaccagagttcgcaagatttgataagtcaaatacgagcagaagccctgcttttgatttggctcttgtgactagagttgttgaagtcacaaacatggaacatggcaagttcctgaatgttgattgcaatcccagcaaaggcacaatggtgggggagtttgactgtcctcaagatgcgtggttctttgatggttcttgcaatgatgggcacatgccttattccatcatcatggaaatcggacttcagacatccggtgttctcaccagtgtgttgaaagcaccactgacgatggacaaagatgacattctctttaggaaccttgatgcaagtgctgaaatggtgaggccagatgtggatgtgagggggaaaaccataaggaatgtgaccaagtgcactggatatgcaatgttgggaaagatggggattcacagattcacgtttgagttgtctgttgatggcgtggttttctacaaaggaagcacttcctttggatggttcactccagaggtgtttgctcagcaagctggacttgacaatgggaaaaagacggagccttggtgcaaaactaacaacacgagtgtgagaagagttgaaatcgcatcagccaaaggcaaagaacagctgactgagaaacttccagatgcaactaatgctcaagttctcagaaggtcagaacagtgtgagtatttggattacctcaacattgctcctgattctgggctgcatgggaaaggatatgcgcatggacacaaagatgttaacccacaagactggttcttctcttgtcacttttggtttgatcctgtgatgcctggatctttgggaattgagtcaatgttccagctcattgaggcatttgcggtggaccagaacataccgggagaatacaatgtgagcaatccgacctttgcccatgcccctggaaaaacggcgtggaagtaccgtggtcaattgacaccaaagaaccgtgcgatggactgtgaggtgcacatagtttcaatcacagcctctcctgaaaatggaggctacgttgacatagtggcagatggagcactttgggttgatggtctccgtgtgtatgaagccaaagaactcagagttcgtgttgtcagtgcaaaacctcaagccattccggatgttcaacaacagccacccagcgcaaaagcggaccctgggaaaactggagttgcactcagtccgactcagttgagagatgtcctgcttgaagtggacaatccattgtatcttggtgttgaaaactccaatttggtgcagtttgaatccaaacctgcaacttcttcaaggattgtcagtatcaaaccatgctccataagtgatcttggtgacaagtccttcatggaaacgtacaatgtgtcagcacctctgtacactggagcaatggccaagggaattgcgtctgcggaccttgtcattgctgctgggaagaggaagatattgggttcttttggagcgggtgggcttccaatgcaccatgtgagggcagctttggagaagatacaagcggctctgcctcaaggaccatatgctgtgaacctcattcattcaccttttgacagcaacttggaaaaggggaatgttgatctcttcctcgaaaagggcgttactgtggtggaggcttctgcattcatgaccctcactccccaagttgttcgttaccgtgcagccggactctcaaggaacgctgatgggagtgtcaacatcagaaaccgtatcattggaaaagtgtccagaacagaactcgccgaaatgttcatcagaccggctccggaacacctccttgagaaactcatagcttctggtgagataacacaagaacaagccgaacttgcccgtcgtgttcctgtcgcagacgacatcgctgttgaagctgattctggtggtcacactgacaaccgtcccatccacgtcatcttgcctttgatcatcaaccttaggaacagactgcacagagagtgtggttatcctgcgcaccttagagtcagagttggagctggaggcggtgttggctgcccacaagctgctgcggctgccctcacaatgggagctgccttcatagtgactgggactgtcaatcaagttgctaaacagtccgggacatgtgacaacgtgagaaaacaactcagtcaagccacctacagtgacatttgcatggctccagcagctgatatgtttgaggaaggtgtgaaactccaagttctcaagaagggaacaatgttcccatcaagagctaacaaattgtacgaactcttttgcaagtacgactctttcgattcaatgcctcctgctgaacttgaaaggatcgagaagaggatcttcaagagggcacttcaagaggtctgggaagagaccaaggacttttacatcaatggtttgaagaatccagagaagatacagagagcggaacatgaccccaaactcaagatgtctttgtgtttcagatggtatcttggtcttgcatcacgttgggccaacatgggtgctcctgatcgtgtcatggactatcaagtctggtgtggtccagccattggagccttcaatgacttcatcaaaggaacatatcttgatcctgctgtctctaatgagtacccatgtgttgtccagatcaaccttcagattttgcgtggtgcatgttacctgaggcgtcttaatgctctgagaaatgatccgaggattgatcttgagactgaagatgctgcctttgtctatgagccaacgaatgcgctttgagtagttagcttaatcacttaggtcaccagtatgaactaaaatgcatgtaggtgtaagagctcatggagagcatggaatattgtatccgaccatgtaacagtataataactgagctccatctcacttcttctatgaataaacaaaggatgttatgatatattaacactctatctatgcaccttattgttctatgataaatttcctcttattattataaatcatctgaatcgtgacggcttatggaatgcttcaaatagtacaaaaacaaatgtgtactataagactttctaaacaattctaactttagcattgtgaacgagacataagtgttaagaagacataacaattataatggaagaagtttgtctccatttatatattatatattacccacttatgtattatattaggatgttaaggagacataacaattataaagagagaagtttgtatccatttatatattatatactacccatttatatattatacttatccacttatttaatgtctttataaggtttgatccatgatatttctaatattttagttgatatgtatatgaaaaggtactatttgaactctcttactctgtataaaggttggatcatccttaaagtgggtctatttaattttattgcttcttacagataaaaaaaaaattatgagttggtttgataaaatattgaaggatttaaaataataataaataataaataacatataatatatgtatataaatttattataatataacatttatctataaaaaagtaaatattgtcataaatctatacaatcgtttagccttgctggaacgaatctcaattatttaaacgagagtaaacatatttgactttttggttatttaacaaattattatttaacactatatgaaattttttttttttatcagcaaagaataaaattaaattaagaaggacaatggtgtcccaatccttatacaaccaacttccacaagaaagtcaagtcagagacaacaaaaaaacaagcaaaggaaattttttaatttgagttgtcttgtttgctgcataatttatgcagtaaaacactacacataacccttttagcagtagagcaatggttgaccgtgtgcttagcttcttttattttatttttttatcagcaaagaataaataaaataaaatgagacacttcagggatgtttcaacccttatacaaaaccccaaaaacaagtttcctagcaccctaccaacgaattcgcggccgcttaattaatcacgagtggatgactgtcacgactgactcatgactgactactagtgctagcctcgaggtcgacacaactttgtataataaagttgtctagacctaggcgagtcatgagtcgtgacatgacgtcatgctcatcagactgcggccgcctcccagtatcattatagtgaaagttttggctctctcgccggtggttttttacctctatttaaaggggttttccacctaaaaattctggtatcattctcactttacttgttactttaatttctcataatctttggttgaaattatcacgcttccgcacacgatatccctacaaatttattatttgttaaacattttcaaaccgcataaaattttatgaagtcccgtctatctttaatgtagtctaacattttcatattgaaatatataatttacttaattttagcgttggtagaaagcataatgatttattcttattcttcttcatataaatgtttaatatacaatataaacaaattctttaccttaagaaggatttcccattttatattttaaaaatatatttatcaaatatttttcaaccacgtaaatctcataataataagttgtttcaaaagtaataaaatttaactccataatttttttattcgactgatcttaaagcaacacccagtgacacaactagccatttttttctttgaataaaaaaatccaattatcattgtattttttttatacaatgaaaatttcaccaaacaatgatttgtggtatttctgaagcaagtcatgttatgcaaaattctataattcccatttgacactacggaagtaactgaagatctgcttttacatgcgagacacatcttctaaagtaattttaataatagttactatattcaagatttcatatatcaaatactcaatattacttctaaaaaattaattagatataattaaaatattacttttttaattttaagtttaattgttgaatttgtgactattgatttattattctactatgtttaaattgttttatagatagtttaaagtaaatataagtaatgtagtagagtgttagagtgttaccctaaaccataaactataagatttatggtggactaattttcatatatttcttattgcttttaccttttcttggtatgtaagtccgtaactggaattactgtgggttgccatgacactctgtggtcttttggttcatgcatggatcttgcgcaagaaaaagacaaagaacaaagaaaaaagacaaaacagagagacaaaacgcaatcacacaaccaactcaaattagtcactggctgatcaagatcgccgcgtccatgtatgtctaaatgccatgcaaagcaacacgtgcttaacatgcactttaaatggctcacccatctcaacccacacacaaacacattgcctttttcttcatcatcaccacaaccacctgtatatattcattctcttccgccacctcaatttcttcacttcaacacacgtcaacctgcatatgcgtgtcatcccatgcccaaatctccatgcatgttccaaccaccttctctcttatataatacctataaatacctctaatatcactcacttctttcatcatccatccatccagagtactactactctactactataataccccaacccaactcatattcaatactactctaggatccacaaccaaaaatgcccactccagatgccactgcgcctctcaacaagccgtcagactatgctgtgtaccacgaagaggatggtcctttctggactgctgattcctctggtgtcagcagagtgaacttctctgaaactggtgtgggatctgaaggtgtcattcctgcgctcacactgattgatgtgtttgagcgtgcggtcaaacgtggtggcaataggattgcattcagaacagagaacatgccaaccttgaggcgtggagaagaggctcctgatgctttgccgctcaaagattggaagtcctggtcttggaaacagtacaaagctgatgttcacagaattgcgagggctctgatggatttgggagttgagcagcacgatgcggtctccatctttggcttcaactcaccagaatggttcctcagtgctgtcggtgcagttcatgctggtgccaagatcgctggaatctacccttcagacactcctgctcaagtgcagtacaaagccttccactctgacactgctgttgcagttgtggagaacgaacagtgcttcaagaaattcgcagaggtggttgaggatctcccttacctcaaagccattgtttgttgggattatgaagccacagacatcacaagggaagatggttcagtggttgaagtcctgacctttgctgagttcctgaagagaggtgacactgtggaagcagctgcacttgatgagagaatcagcaagattgagcccaccatgtgtgctgccctgatctacaccagtggcacaactgggagacccaaagctgtcatgatctcccatgacaaccttgtctttgaagcatctgctgtggtcccgaacttgggaggggcatgcacgaccactgctgaggaaaggattctttcctaccttcctttgtctcatgttgctggaatgatggttgacatcattgctccaatcatagcgacagcgttccacaaaggaaggatctgtgtttgttttgccagaccgtatgatttgagaactggaacccttgggcaaagactcaatgcagtggagccaaccatattccttggtgtgccacgtgtgtgggaaaagatccaagagaaattgatggctgttggtgccaaaaccactggtctcaagaagaaactcagcacggcagccaagaaacgtgggcttgaatttcaagaggaacaacagatagggagaagtggtgccaaccctggctttggaccgcttggaatctacaagaaacttttgggcctcatcaaaggaaagttggggctgaccaaatgcaagtttgcctttgctggcgcagctccaatgacccgtgaaacccttcagtactttggagcgctgaacatcaacatcaatgaggtctatggaatgtctgaatgcagtggggctgccacctggtcaactgacaaagctcatgagtggggcactgttggctatgagatgccctcctgtgaagtcagagtgttcaagattgcggaggatggcaccaagacagagtgcccaagagctgctgacatcatgcatgccacagaagaggaacaaggtgaagtttgcttccgtggaaggaacatcatgatgggatacttggccaacccgaaacttggtgatgaccatgttgctgagattgaagagaagaatgcagctgccatagatagcgaagggtggcttcactctggtgacaagggagcaatttccacaaggggaatgctcaagataacgggcagatacaaggagcttatcataggtgctggtggggagaatgtggctcctgttcccattgaagatgccatcaaggcgaggatgccttttgtttcaaatgcaatgatggttggagacaagaggaagttcatggctgtccttctgactttgaaaacggttggagcaactggagagcttcctggcacaaacaagctcatgggagcagctgcggactatggtgagaccattgaggatgcctgtgacaatgaggcgctcattgaagagataacgcagcaactcaaagagataggtgacgatggagatgtcacgccaagcaatgcagcccgtatacaaaagttcacgattttgccactcgacttcagtgtctccacagatgaactgacagcaacgttgaaattgaagagaagtgtggttgcagacaagtatgaggacatcatagaggctttctatgagagcaagtctgtctttgtgccttactcaacagttggagcttatgcaacgggtggaccagttgatgactctgttgtggatggatcattcaaaggtgactttagcatgattggggatgacgatccggatcttcagaatgtggatgtccttgaagcaattgatgaggacaactgagtagttagcttaatcacttaggtcaccagtatgaactaaaatgcatgtaggtgtaagagctcatggagagcatggaatattgtatccgaccatgtaacagtataataactgagctccatctcacttcttctatgaataaacaaaggatgttatgatatattaacactctatctatgcaccttattgttctatgataaatttcctcttattattataaatcatctgaatcgtgacggcttatggaatgcttcaaatagtacaaaaacaaatgtgtactataagactttctaaacaattctaactttagcattgtgaacgagacataagtgttaagaagacataacaattataatggaagaagtttgtctccatttatatattatatattacccacttatgtattatattaggatgttaaggagacataacaattataaagagagaagtttgtatccatttatatattatatactacccatttatatattatacttatccacttatttaatgtctttataaggtttgatccatgatatttctaatattttagttgatatgtatatgaaaaggtactatttgaactctcttactctgtataaaggttggatcatccttaaagtgggtctatttaattttattgcttcttacagataaaaaaaaaattatgagttggtttgataaaatattgaaggatttaaaataataataaataataaataacatataatatatgtatataaatttattataatataacatttatctataaaaaagtaaatattgtcataaatctatacaatcgtttagccttgctggaacgaatctcaattatttaaacgagagtaaacatatttgactttttggttatttaacaaattattatttaacactatatgaaattttttttttttatcagcaaagaataaaattaaattaagaaggacaatggtgtcccaatccttatacaaccaacttccacaagaaagtcaagtcagagacaacaaaaaaacaagcaaaggaaattttttaatttgagttgtcttgtttgctgcataatttatgcagtaaaacactacacataacccttttagcagtagagcaatggttgaccgtgtgcttagcttcttttattttatttttttatcagcaaagaataaataaaataaaatgagacacttcagggatgtttcaacccttatacaaaaccccaaaaacaagtttcctagcaccctaccaacgaattcgcggccgcttaattaatctgatcatggatgctacgtcacggcagtacaggactatcactagacctaggagctgtgctgggtaactcacatgagtcactggtcacatcagcggccgcctcccagtatcattatagtgaaagttttggctctctcgccggtggttttttacctctatttaaaggggttttccacctaaaaattctggtatcattctcactttacttgttactttaatttctcataatctttggttgaaattatcacgcttccgcacacgatatccctacaaatttattatttgttaaacattttcaaaccgcataaaattttatgaagtcccgtctatctttaatgtagtctaacattttcatattgaaatatataatttacttaattttagcgttggtagaaagcataatgatttattcttattcttcttcatataaatgtttaatatacaatataaacaaattctttaccttaagaaggatttcccattttatattttaaaaatatatttatcaaatatttttcaaccacgtaaatctcataataataagttgtttcaaaagtaataaaatttaactccataatttttttattcgactgatcttaaagcaacacccagtgacacaactagccatttttttctttgaataaaaaaatccaattatcattgtattttttttatacaatgaaaatttcaccaaacaatgatttgtggtatttctgaagcaagtcatgttatgcaaaattctataattcccatttgacactacggaagtaactgaagatctgcttttacatgcgagacacatcttctaaagtaattttaataatagttactatattcaagatttcatatatcaaatactcaatattacttctaaaaaattaattagatataattaaaatattacttttttaattttaagtttaattgttgaatttgtgactattgatttattattctactatgtttaaattgttttatagatagtttaaagtaaatataagtaatgtagtagagtgttagagtgttaccctaaaccataaactataagatttatggtggactaattttcatatatttcttattgcttttaccttttcttggtatgtaagtccgtaactggaattactgtgggttgccatgacactctgtggtcttttggttcatgcatggatcttgcgcaagaaaaagacaaagaacaaagaaaaaagacaaaacagagagacaaaacgcaatcacacaaccaactcaaattagtcactggctgatcaagatcgccgcgtccatgtatgtctaaatgccatgcaaagcaacacgtgcttaacatgcactttaaatggctcacccatctcaacccacacacaaacacattgcctttttcttcatcatcaccacaaccacctgtatatattcattctcttccgccacctcaatttcttcacttcaacacacgtcaacctgcatatgcgtgtcatcccatgcccaaatctccatgcatgttccaaccaccttctctcttatataatacctataaatacctctaatatcactcacttctttcatcatccatccatccagagtactactactctactactataataccccaacccaactcatattcaatactactctaggatccacaaccaaaaatgcttcagcacacttggcttccgaagcctcccaatctgaccctcttgtcagatgaggttcatctctggaggattcctcttgaccagcctgagtcacaacttcaagaccttgctgccaccctgagcagtgatgaattggcgagggcaaacagattctactttccagaacacagaaggcgtttcactgctgggagaggcatcctcagatccatcttgggtggatacttgggagtggaaccgggtcaagtcaagtttgattatgagtcccgtgggaaaccgatccttggtgacagatttgctgagagtggactcctgttcaacttgtctcacagccagaaccttgccttgtgtgctgtcaactacacgcgtcaaataggcattgatcttgaatatctgcgtccaacatctgacttggagtctcttgcaaagaggttctttctcccaagagaatatgaactcttgaggtcactccctgatgagcagaaacagaagattttctttcgttactggacttgcaaagaggcttatctcaaagcaacgggagatggaatagccaaacttgaagagatcgagatagcactcaccccaacagaacctgccaagctccaaacagctcctgcgtggtctctgttggagcttgtgccagatgacaattgtgttgcagctgtggctgttgcgggttttggttggcagcccaagttctggcattactgagtagttagcttaatcacttaggtcaccagtatgaactaaaatgcatgtaggtgtaagagctcatggagagcatggaatattgtatccgaccatgtaacagtataataactgagctccatctcacttcttctatgaataaacaaaggatgttatgatatattaacactctatctatgcaccttattgttctatgataaatttcctcttattattataaatcatctgaatcgtgacggcttatggaatgcttcaaatagtacaaaaacaaatgtgtactataagactttctaaacaattctaactttagcattgtgaacgagacataagtgttaagaagacataacaattataatggaagaagtttgtctccatttatatattatatattacccacttatgtattatattaggatgttaaggagacataacaattataaagagagaagtttgtatccatttatatattatatactacccatttatatattatacttatccacttatttaatgtctttataaggtttgatccatgatatttctaatattttagttgatatgtatatgaaaaggtactatttgaactctcttactctgtataaaggttggatcatccttaaagtgggtctatttaattttattgcttcttacagataaaaaaaaaattatgagttggtttgataaaatattgaaggatttaaaataataataaataataaataacatataatatatgtatataaatttattataatataacatttatctataaaaaagtaaatattgtcataaatctatacaatcgtttagccttgctggaacgaatctcaattatttaaacgagagtaaacatatttgactttttggttatttaacaaattattatttaacactatatgaaattttttttttttatcagcaaagaataaaattaaattaagaaggacaatggtgtcccaatccttatacaaccaacttccacaagaaagtcaagtcagagacaacaaaaaaacaagcaaaggaaattttttaatttgagttgtcttgtttgctgcataatttatgcagtaaaacactacacataacccttttagcagtagagcaatggttgaccgtgtgcttagcttcttttattttatttttttatcagcaaagaataaataaaataaaatgagacacttcagggatgtttcaacccttatacaaaaccccaaaaacaagtttcctagcaccctaccaacgaattcgcggccgcttaattaactactgtcactgaggccgtagacgagtacggactgatctaactagtgctagcctcgaggtcgacacccagctttcttgtacaaagtggttgcggccgcttaattaaatttaaattcaattaatgcaatcttgattttcaacaacgaaggtaatggcgtaaaagaaaaaatgtatgttattgtattgatctttcatgatgttgaagcgtgccataatatgatgatgtataattaaaatattaactgtcgcattttattgaaatggcactgttatttcaaccatatctttgattctgttacatgacacgactgcaagaagtaaataatagacgccgttgttaaagaattgctatcatatgtgcctaactagagggaatttgagcgtcagacctaatcaaatattacaaaatatctcactctgtcgccagcaatggtgtaatcagcgcagacaaatggcgtaaagatcgcggaaaaacctccccgagtggcatgatagctgcctctgtattgctgatttagtcagccttatttgacttaagggtgccctcgttagtgacaaattgctttcaaggagacagccatgccccacactttgttgaaaaacaaattgcctttggggagacggtaaagccagttgctcttcaataaggaatgtcgaggaggcaatgtaaccgcctctggtagtacacttctctaatccaaaaatcaatttgtattcaagataccgcaaaaaacttatggtttaaaccctgcaggactagtccagaaggtaattatccaagatgtagcatcaagaatccaatgtttacgggaaaaactatggaagtattatgtaagctcagcaagaagcagatcaatatgcggcacatatgcaacctatgttcaaaaatgaagaatgtacagatacaagatcctatactgccagaatacgaagaagaatacgtagaaattgaaaaagaagaaccaggcgaagaaaagaatcttgaagacgtaagcactgacgacaacaatgaaaagaagaagataaggtcggtgattgtgaaagagacatagaggacacatgtaaggtggaaaatgtaagggcggaaagtaaccttatcacaaaggaatcttatcccccactacttatccttttatatttttccgtgtcatttttgcccttgagttttcctatataaggaaccaagttcggcatttgtgaaaacaagaaaaaatttggtgtaagctattttctttgaagtactgaggatacaacttcagagaaatttgtaagtttgtaggtaccagatctggatcccaaaccatgtctccggagaggagaccagttgagattaggccagctacagcagctgatatggccgcggtttgtgatatcgttaaccattacattgagacgtctacagtgaactttaggacagagccacaaacaccacaagagtggattgatgatctagagaggttgcaagatagatacccttggttggttgctgaggttgagggtgttgtggctggtattgcttacgctgggccctggaaggctaggaacgcttacgattggacagttgagagtactgtttacgtgtcacataggcatcaaaggttgggcctaggatctacattgtacacacatttgcttaagtctatggaggcgcaaggttttaagtctgtggttgctgttataggccttccaaacgatccatctgttaggttgcatgaggctttgggatacacagcccggggtacattgcgcgcagctggatacaagcatggtggatggcatgatgttggtttttggcaaagggattttgagttgccagctcctccaaggccagttaggccagttacccaaatctgagtagttagcttaatcacctagagctcgatcggcggcaatagcttcttagcgccatcccgggttgatcctatctgtgttgaaatagttgcggtgggcaaggctctctttcagaaagacaggcggccaaaggaacccaaggtgaggtgggctatggctctcagttccttgtggaagcgcttggtctaaggtgcagaggtgttagcgggatgaagcaaaagtgtccgattgtaacaagatatgttgatcctacgtaaggatattaaagtatgtattcatcactaatataatcagtgtattccaatatgtactacgatttccaatgtctttattgtcgccgtatgtaatcggcgtcacaaaataatccccggtgactttcttttaatccaggatgaaataatatgttattataatttttgcgatttggtccgttataggaattgaagtgtgcttgaggtcggtcgccaccactcccatttcataattttacatgtatttgaaaaataaaaatttatggtattcaatttaaacacgtatacttgtaaagaatgatatcttgaaagaaatatagtttaaatatttattgataaaataacaagtcaggtattatagtccaagcaaaaacataaatttattgatgcaagtttaaattcagaaatatttcaataactgattatatcagctggtacattgccgtagatgaaagactgagtgcgatattatggtgtaatacataggaattcgtttaaacgatctgcgtctaattttcggtccaacttgcacaggaaagacgtcgaccgcggtagctcttgcccagcagactgggcttccagtcctttcgctcgatcgggtccaatgttgtcctcagctgtgaaccggaagcggacgaccaacagtggaagaactgaaaggaacgagccgtctataccttgatgatcggcctctggtgaagggtatcatcgcagccaagcaagctcatgaaaggctgatgggggaggtgtataattatgaggcccacggcgggcttattctttagggaggatctatctcgttgctcaagtgcatggcgcaaagcagttattggagtgcggattttcgttggcatattattcgccacgagttagcagacgaagagaccttcatgaacgtggccaaggccagagttaagcagatgttacgccctgctgcaggcctttctattatccaatagttggttgatctttggaaagagcctcggctgaggcccatactgaaagagatcgatggatatcgatatgccatgttgtttgctagccagaaccagatcacatccgatatgctattgcagcttgacgcagatatggaggataagttgattcatgggatcgctcaggagtagctcatccatgcacgccgacaagaacagaaattccgtcgagttaacgcagccgcttacgacggattcgaaggtcatccattcggaatgtattagtttgcaccagctccgcgtcacacctgtcttcatttgaataagatgttagcaattgtttttagctttgtcttgttgtggcagggcggcaagtgcttcagacatcattctgttttcaaattttatgctggagaacagcttcttaattcctttggaaataatagactgcgtcttaaaattcagatgtctggatatagatatgattgtaaaataacctatttaagtgtcatttagaacataagttttatgaatgttcttccattttcgtcatcgaacgaataagagtaaatacaccttttttaacattacaaataagttcttatacgttgtttatacaccgggaatcatttccattattttcgcgcaaaagtcacggatattcgtgaaagcgacataaactgcgaaatttgcggggagtgtcttgagtttgcctcgaggctagcgcatgcacatagacacacacatcatctcattgatgcttggtaataattgtcattagattgtttttatgcatagatgcactcgaaatcagccaattttagacaagtatcaaacggatgtgacttcagtacattaaaaacgtccgcaatgtgttattaagttgtctaagcgtcaatttgatttacaattgaatatatcctgccccagccagccaacagctcgatttacaattgaatatatcctgccggccggcccacgcgtgtcgaggaattctgatctggcccccatttggacgtgaatgtagacacgtcgaaataaagatttccgaattagaataatttgtttattgctttcgcctataaatacgacggatcgtaatttgtcgttttatcaaaatgtactttcattttataataacgctgcggacatctacatttttgaattgaaaaaaaattggtaattactctttctttttctccatattgaccatcatactcattgctgatccatgtagatttcccggacatgaagccatttacaattgaatatatcctgccgccgctgccgctttgcacccggtggagcttgcatgttggtttctacgcagaactgagccggttaggcagataatttccattgagaactgagccatgtgcaccttccccccaacacggtgagcgacggggcaacggagtgatccacatgggacttttaaacatcatccgtcggatggcgttgcgagagaagcagtcgatccgtgagatcagccgacgcaccgggcaggcgcgcaacacgatcgcaaagtatttgaacgcaggtacaatcgagccgacgttcacgcggaacgaccaagcaagcttggctgccatttttggggtgaggccgttcgcggccgaggggcgcagcccctggggggatgggaggcccgcgttagcgggccgggagggttcgagaagggggggcaccccccttcggcgtgcgcggtcacgcgcacagggcgcagccctggttaaaaacaaggtttataaatattggtttaaaagcaggttaaaagacaggttagcggtggccgaaaaacgggcggaaacccttgcaaatgctggattttctgcctgtggacagcccctcaaatgtcaataggtgcgcccctcatctgtcagcactctgcccctcaagtgtcaaggatcgcgcccctcatctgtcagtagtcgcgcccctcaagtgtcaataccgcagggcacttatccccaggcttgtccacatcatctgtgggaaactcgcgtaaaatcaggcgttttcgccgatttgcgaggctggccagctccacgtcgccggccgaaatcgagcctgcccctcatctgtcaacgccgcgccgggtgagtcggcccctcaagtgtcaacgtccgcccctcatctgtcagtgagggccaagttttccgcgaggtatccacaacgccggcggccgcggtgtctcgcacacggcttcgacggcgtttctggcgcgtttgcagggccatagacggccgccagcccagcggcgagggcaaccagcccggtgagcgtcggaaagggtcgacggatcttttccgctgcataaccctgcttcggggtcattatagcgattttttcggtatatccatcctttttcgcacgatatacaggattttgccaaagggttcgtgtagactttccttggtgtatccaacggcgtcagccgggcaggataggtgaagtaggcccacccgcgagcgggtgttccttcttcactgtcccttattcgcacctggcggtgctcaacgggaatcctgctctgcgaggctggccggctaccgccggcgtaacagatgagggcaagcggatggctgatgaaaccaagccaaccaggaagggcagcccacctatcaaggtgtactgccttccagacgaacgaagagcgattgaggaaaaggcggcggcggccggcatgagcctgtcggcctacctgctggccgtcggccagggctacaaaatcacgggcgtcgtggactatgagcacgtccgcgagctggcccgcatcaatggcgacctgggccgcctgggcggcctgctgaaactctggctcaccgacgacccgcgcacggcgcggttcggtgatgccacgatcctcgccctgctggcgaagatcgaagagaagcaggacgagcttggcaaggtcatgatgggcgtggtccgcccgagggcagagccatgacttttttagccgctaaaacggccggggggtgcgcgtgattgccaagcacgtccccatgcgctccatcaagaagagcgacttcgcggagctggtattcgtgcagggcaagattcggaataccaagtacgagaaggacggccagacggtctacgggaccgacttcattgccgataaggtggattatctggacaccaaggcaccaggcgggtcaaatcaggaataagggcacattgccccggcgtgagtcggggcaatcccgcaaggagggtgaatgaatcggacgtttgaccggaaggcatacaggcaagaactgatcgacgcggggttttccgccgaggatgccgaaaccatcgcaagccgcaccgtcatgcgtgcgccccgcgaaaccttccagtccgtcggctcgatggtccagcaagctacggccaagatcgagcgcgacagcgtgcaactggctccccctgccctgcccgcgccatcggccgccgtggagcgttcgcgtcgtctcgaacaggaggcggcaggtttggcgaagtcgatgaccatcgacacgcgaggaactatgacgaccaagaagcgaaaaaccgccggcgaggacctggcaaaacaggtcagcgaggccaagcaggccgcgttgctgaaacacacgaagcagcagatcaaggaaatgcagctttccttgttcgatattgcgccgtggccggacacgatgcgagcgatgccaaacgacacggcccgctctgccctgttcaccacgcgcaacaagaaaatcccgcgcgaggcgctgcaaaacaaggtcattttccacgtcaacaaggacgtgaagatcacctacaccggcgtcgagctgcgggccgacgatgacgaactggtgtggcagcaggtgttggagtacgcgaagcgcacccctatcggcgagccgatcaccttcacgttctacgagctttgccaggacctgggctggtcgatcaatggccggtattacacgaaggccgaggaatgcctgtcgcgcctacaggcgacggcgatgggcttcacgtccgaccgcgttgggcacctggaatcggtgtcgctgctgcaccgcttccgcgtcctggaccgtggcaagaaaacgtcccgttgccaggtcctgatcgacgaggaaatcgtcgtgctgtttgctggcgaccactacacgaaattcatatgggagaagtaccgcaagctgtcgccgacggcccgacggatgttcgactatttcagctcgcaccgggagccgtacccgctcaagctggaaaccttccgcctcatgtgcggatcggattccacccgcgtgaagaagtggcgcgagcaggtcggcgaagcctgcgaagagttgcgaggcagcggcctggtggaacacgcctgggtcaatgatgacctggtgcattgcaaacgctagggccttgtggggtcagttccggctgggggttcagcagccagcgctttactggcatttcaggaacaagcgggcactgctcgacgcacttgcttcgctcagtatcgctcgggacgcacggcgcgctctacgaactgccgataaacagaggattaaaattgacaattgtgattaaggctcagattcgacggcttggagcggccgacgtgcaggatttccgcgagatccgattgtcggccctgaagaaagctccagagatgttcgggtccgtttacgagcacgaggagaaaaagcccatggaggcgttcgctgaacggttgcgagatgccgtggcattcggcgcctacatcgacggcgagatcattgggctgtcggtcttcaaacaggaggacggccccaaggacgctcacaaggcgcatctgtccggcgttttcgtggagcccgaacagcgaggccgaggggtcgccggtatgctgctgcgggcgttgccggcgggtttattgctcgtgatgatcgtccgacagattccaacgggaatctggtggatgcgcatcttcatcctcggcgcacttaatatttcgctattctggagcttgttgtttatttcggtctaccgcctgccgggcggggtcgcggcgacggtaggcgctgtgcagccgctgatggtcgtgttcatctctgccgctctgctaggtagcccgatacgattgatggcggtcctgggggctatttgcggaactgcgggcgtggcgctgttggtgttgacaccaaacgcagcgctagatcctgtcggcgtcgcagcgggcctggcgggggcggtttccatggcgttcggaaccgtgctgacccgcaagtggcaacctcccgtgcctctgctcacctttaccgcctggcaactggcggccggaggacttctgctcgttccagtagctttagtgtttgatccgccaatcccgatgcctacaggaaccaatgttctcggcctggcgtggctcggcctgatcggagcgggtttaacctacttcctttggttccgggggatctcgcgactcgaacctacagttgtttccttactgggctttctcagcccccgagcgcttagtgggaatttgtaccccttatcgaaccgggagcacaggatgacgcctaacaattcattcaagccgacaccgcttcgcggcgcggcttaattcaggagttaaacatcatgagggaagcggtgatcgccgaagtatcgactcaactatcagaggtagttggcgtcatcgagcgccatctcgaaccgacgttgctggccgtacatttgtacggctccgcagtggatggcggcctgaagccacacagtgatattgatttgctggttacggtgaccgtaaggcttgatgaaacaacgcggcgagctttgatcaacgaccttttggaaacttcggcttcccctggagagagcgagattctccgcgctgtagaagtcaccattgttgtgcacgacgacatcattccgtggcgttatccagctaagcgcgaactgcaatttggagaatggcagcgcaatgacattcttgcaggtatcttcgagccagccacgatcgacattgatctggctatcttgctgacaaaagcaagagaacatagcgttgccttggtaggtccagcggcggaggaactctttgatccggttcctgaacaggatctatttgaggcgctaaatgaaaccttaacgctatggaactcgccgcccgactgggctggcgatgagcgaaatgtagtgcttacgttgtcccgcatttggtacagcgcagtaaccggcaaaatcgcgccgaaggatgtcgctgccgactgggcaatggagcgcctgccggcccagtatcagcccgtcatacttgaagctaggcaggcttatcttggacaagaagatcgcttggcctcgcgcgcagatcagttggaagaatttgttcactacgtgaaaggcgagatcaccaaggtagtcggcaaataatgtctaacaattcgttcaagccgacgccgcttcgcggcgcggcttaactcaagcgttagagagctggggaagactatgcgcgatctgttgaaggtggttctaagcctcgtcttgcgatggcatttcgatccattcccattccgcgctcaagatggcttcccctcggcagttcatcagggctaaatcaatctagccgacttgtccggtgaaatgggctgcactccaacagaaacaatcaaacaaacatacacagcgacttattcacacgagctcaaattacaacggtatatatcctgccagtcagcatcatcacaccaaaagttaggcccgaatagtttgaaattagaaagctcgcaattgaggtctacaggccaaattcgctcttagccgtacaatattactcaccggatcctaaccggtttaattaaggcgcgccatgcccgggcaagcggccgcacaagttt

SEQ ID NO: 46 - DNA, 41726 bp, Artificial sequence
  plasmid pDAB9337
gtacaaaaaagcaggcttctagacctaggtggagtcatcacgcagactatctcagcatgtgcgtagcacgcggccgcctcccagtatcattatagtgaaagttttggctctctcgccggtggttttttacctctatttaaaggggttttccacctaaaaattctggtatcattctcactttacttgttactttaatttctcataatctttggttgaaattatcacgcttccgcacacgatatccctacaaatttattatttgttaaacattttcaaaccgcataaaattttatgaagtcccgtctatctttaatgtagtctaacattttcatattgaaatatataatttacttaattttagcgttggtagaaagcataatgatttattcttattcttcttcatataaatgtttaatatacaatataaacaaattctttaccttaagaaggatttcccattttatattttaaaaatatatttatcaaatatttttcaaccacgtaaatctcataataataagttgtttcaaaagtaataaaatttaactccataatttttttattcgactgatcttaaagcaacacccagtgacacaactagccatttttttctttgaataaaaaaatccaattatcattgtattttttttatacaatgaaaatttcaccaaacaatgatttgtggtatttctgaagcaagtcatgttatgcaaaattctataattcccatttgacactacggaagtaactgaagatctgcttttacatgcgagacacatcttctaaagtaattttaataatagttactatattcaagatttcatatatcaaatactcaatattacttctaaaaaattaattagatataattaaaatattacttttttaattttaagtttaattgttgaatttgtgactattgatttattattctactatgtttaaattgttttatagatagtttaaagtaaatataagtaatgtagtagagtgttagagtgttaccctaaaccataaactataagatttatggtggactaattttcatatatttcttattgcttttaccttttcttggtatgtaagtccgtaactggaattactgtgggttgccatgacactctgtggtcttttggttcatgcatggatcttgcgcaagaaaaagacaaagaacaaagaaaaaagacaaaacagagagacaaaacgcaatcacacaaccaactcaaattagtcactggctgatcaagatcgccgcgtccatgtatgtctaaatgccatgcaaagcaacacgtgcttaacatgcactttaaatggctcacccatctcaacccacacacaaacacattgcctttttcttcatcatcaccacaaccacctgtatatattcattctcttccgccacctcaatttcttcacttcaacacacgtcaacctgcatatgcgtgtcatcccatgcccaaatctccatgcatgttccaaccaccttctctcttatataatacctataaatacctctaatatcactcacttctttcatcatccatccatccagagtactactactctactactataataccccaacccaactcatattcaatactactctaggatccacaaccaaaaatggcagcgaggctgcaagagcagaaaggaggtgagatggacacgaggattgcgatcataggcatgagcgccatacttccttgtggaaccacggtgagagagtcatgggagaccataagggctggcattgattgcctgtctgatcttcctgaggatcgtgttgatgtgactgcgtactttgacccagtcaagaccacaaaggacaaaatctactgcaagagaggaggtttcattcctgagtatgactttgatgcgcgtgagtttggtctcaacatgttccagatggaagattctgatgcgaatcagaccatctcacttctcaaggtcaaagaagcacttcaagatgctgggattgatgcacttggaaaggagaagaaaaacataggatgcgtgcttggcattggaggtggacagaagagttcacatgagttctacagcagactcaactatgtggttgtggagaaagtcttgagaaagatggggatgccagaggaagatgtcaaagtggctgtggagaagtacaaagcgaacttcccagaatggagacttgactctttccctggattccttgggaatgtcactgctggcagatgcaccaacacattcaacttggatggcatgaactgcgttgtggatgctgcatgtgcaagctccttgatagcagtcaaggttgcgattgatgaactgctctatggtgactgcgacatgatggtcactggtgcaacctgcacagacaactccattgggatgtacatggctttctcaaagacacctgtgttcagcacggacccaagtgtgagagcgtatgatgagaaaacgaaagggatgctcattggtgagggatcagccatgttggtgctcaaacgttatgcagatgcagtgagggatggtgatgagattcatgctgtgattcgtggttgtgcaagctcaagtgatggcaaagcagctggcatctacactcccacaatcagtggtcaagaggaagccttgagacgtgcatacaatcgtgcctgcgttgaccctgccactgtcactttggttgagggtcatgggactggcactccagttggagataggattgagttgactgcgttgaggaacttgtttgacaaagcgtatggtgaagggaacacagagaaagttgcagttggaagtatcaagtccagtattggtcatttgaaggctgttgctggtcttgctggaatgatcaaggtcatcatggctctcaaacacaagactttgcctggaacgatcaatgtggacaatccacccaatctctatgacaacactcccatcaatgagtcatccctctacatcaacacgatgaacagaccctggttccctccacctggtgttccgagacgtgctggaatatccagctttggctttggaggtgccaactaccatgcagtgttggaagaggctgaaccagagcacacgacagcgtacagactcaacaaacgtccacaaccggtgttgatgatggctgcaactcctgctgcgttgcagagcctttgtgaagctcagctgaaagagtttgaagctgcgatcaaggagaatgagacagtcaagaatactgcctacatcaagtgtgtcaagtttggagaacagttcaagttccctgggagcatacctgcgaccaatgcgagactgggattcttggtcaaagatgcggaggatgcgtgctccacgcttcgtgctatatgtgctcagtttgccaaagatgtgaccaaagaagcgtggaggcttccgagagaaggagtttctttccgtgccaaaggcattgccaccaatggtgctgttgctgcactcttctctggacaaggtgctcagtacacacacatgttcagtgaagttgcgatgaactggcctcagttcagacagtccattgctgcaatggacgctgcacagtccaaggttgctggaagtgacaaagactttgaaagagtctctcaagtcctgtacccaaggaaaccgtacgaacgtgagccagaacaagatcacaagaaaatctcactcacagcatacagccagccgtcaaccctggcatgtgctcttggtgcctttgagattttcaaggaagctggattcactccagactttgcagctggacacagcttgggtgagtttgctgcgctctatgcagctggttgtgttgacagagatgagttgtttgaacttgtttgcagaagggcaaggatcatgggaggcaaagatgcacctgccacacccaaaggttgcatggcagctgtcataggacccaacgcagagaacatcaaggttcaagctgccaacgtctggcttggaaactcaaactctccgtctcagactgtcattactgggtctgttgaagggattcaagctgaaagtgccagattgcagaaggaagggttcagagttgtgcctcttgcttgtgagtctgccttccattctccacagatggaaaatgccagctcagctttcaaagatgtcatatccaaggtttccttccgtacacccaaagcagaaacaaagctcttcagcaatgtttctggagagacctatccgacggatgccagagagatgctcactcaacacatgacctcatctgtgaagttcctgacccaagtgaggaacatgcaccaagctggtgcgagaatctttgttgagtttggaccgaaacaagttctcagcaaacttgtttctgaaaccctcaaagatgacccgtctgttgtcacagtgtctgtgaacccagcttctggcacggactctgacatacagttgagggatgctgcagttcagctggttgtggctggtgtcaatcttcaagggtttgacaagtgggatgctcctgatgccacgaggatgcaagccatcaagaaaaagagaaccacactcagactttcagctgccacctatgtcagtgacaagaccaagaaagtgagggatgctgccatgaacgacggaagatgtgtcacatacctcaagggtgctgcaccactcatcaaggctcctgaacctgtggttgacgaagctgccaagagggaggctgaaaggcttcagaaggagcttcaagacgctcagaggcagcttgacgacgccaaacgtgcagctgcagaagccaactccaaacttgctgctgccaaggaggaagccaagactgctgcagcttcagccaagcctgcagttgacactgctgttgtggagaaacatcgtgccatcctcaagtccatgctggctgagctggatggttatggaagtgttgatgcttcttcccttcagcaacagcaacagcaacagactgctccggcgcctgttaaagccgctgcccctgccgctcccgttgcaagtgctcctgctcccgccgtgtccaacgagttgcttgagaaagctgagacagttgtgatggaggttctcgctgccaagactggatacgaaacagacatgattgaggcggacatggagcttgagactgagttgggaattgacagcatcaagagggttgaaattctttctgaagtccaagctatgcttaacgttgaggcgaaagatgttgatgctctctctaggacgagaacagtgggtgaagttgtcaacgctatgaaggcagaaatcgctggttcttccgctccggcgccggcagctgccgcacctgcaccggctaaagcggctccagctgcagctgcaccagctgtttctaatgagctgctcgaaaaggcagaaactgttgtgatggaagtccttgctgccaaaactggctacgaaactgacatgatagaatcagacatggagcttgagacggagcttggaattgattccatcaagcgtgtggaaatcctcagtgaagtccaagccatgctcaatgtggaagctaaggatgtggatgctctctcaaggaccagaactgtcggtgaggttgtcaatgccatgaaggctgagatagctggaggctccgctcctgcgccggccgctgccgctcctggtcccgctgccgcggctccagctccagctgcagccgctccggccgtctcaaacgaactccttgaaaaagctgagaccgtcgtgatggaggtcttggcagctaaaaccggctatgagactgacatgattgagtctgacatggaattggagacagaacttgggatagacagcatcaaacgtgttgaaatcctcagtgaggtccaagctatgctgaacgtggaagcgaaggatgttgatgctctgtccagaacgaggaccgttggtgaggttgtggatgccatgaaggctgaaattgctggagggtctgcgcccgcgccagctgcagccgctcctgcacccgcagccgcggcacctgctccagctgcacctgcacctgccgtttcttcagaactcttggagaaggctgagacggttgtgatggaggttttggctgcaaagactggctatgagaccgacatgattgaatctgatatggaattggagacagagcttgggatcgattccatcaaaagagtggagatcctgagtgaagtccaagccatgctcaatgttgaagctaaggatgttgatgcactttcaagaacaaggacagtgggtgaggttgtggatgccatgaaggcggagattgctggagggagcgcgcctgcgccagctgccgcggcacctgcaccggcagccgcagctccagctccagctgcaccagcaccggccgcgcccgcgccagctgtttcatccgaactcctggaaaaggccgagacggttgtgatggaggtgctcgcagctaagactggttacgagaccgacatgattgaaagtgacatggagcttgaaaccgagttgggaatagatagcatcaaacgtgttgaaatcttgtctgaggtccaagctatgttgaacgtggaggcaaaagatgtcgatgcgctttcaagaaccagaacagtcggtgaggtcgtggacgccatgaaggctgaaattgccggaagctctgctagtgcgccagctgcagccgcacctgcacctgctgccgcggcacctgctccagctgcagccgctcctgccgtcagcaatgagttgctggagaaagccgaaacagttgtgatggaagtccttgctgcaaaaactggttacgaaacggacatgattgagtcagacatggaattggagaccgaacttggaatagattccatcaagagagtggagatcctctctgaggtgcaagccatgctcaacgttgaggctaaagatgttgatgcactcagtaggacaagaactgtgggggaagttgtcgatgcgatgaaggctgagattgctggaggctctgctcctgcgccggcagctgccgcacctgcacccgcagccgcggcaccagctgtcagcaacgaattgcttgagaaggctgaaacagttgtcatggaagtgctggctgcaaaaaccggctatgagactgacatgattgagtctgacatggaacttgagacggaattgggcattgacagcatcaagcgtgttgagatcctcagtgaagtccaagcaatgctcaatgtggaggctaaggatgtggatgccctctcaaggaccagaacagttggtgaggtcgttgatgcgatgaaggcggagatcgctggaagttccgcgcctgcgccagctgcagccgctcctgcacccgcagccgcggcaccggctccagctgcagccgcaccggccgtctcctcagaactcctggaaaaggctgagacagttgtgatggaagtccttgctgcgaaaactggctatgagaccgacatgattgaatctgacatggaactggagaccgagcttggaattgactccatcaaacgtgttgaaatcctctctgaggttcaagcgatgttgaatgtggaggccaaagatgttgatgctctttccagaacaaggacggtgggagaggtggttgatgccatgaaggctgagatagctgggggttctgctcctgcgccagctgcagccgctcctgctcccgctgccgcggcaccagctgtcagcaacgaactccttgaaaaagctgaaactgttgtgatggaggttttggctgcaaagactggatacgagactgacatgatagagtcagacatggagttggaaacagagcttgggattgatagcatcaagcgtgtggaaatcctttctgaggttcaagccatgctgaacgttgaggccaaagatgtcgatgctttgtcaaggaccagaacggttggagaagtggtcgatgccatgaaggctgagatagctggtggatcagcccctgctccggctgcagccgctcctgcaagtgccggtgctgcaccagctgtgaagattgattcagttcatggtgctgactgtgacgatttgtcactgatgcacgcaaaggtggttgacatcagaaggccagatgaactgattctggaaagaccggagaaccgtccagttcttgtcgttgacgatggctcagagttgacacttgctcttgtgagggtgttgggagcctgtgcagttgtcttgacctttgagggattgcagttggctcagagagctggtgcagctgccattcgtcatgttctggctaaggacctttcagcagaatcagctgagaaggccatcaaagaggctgagcaaagatttggagcgttgggaggcttcataagccagcaagcagaaaggtttgaaccagctgagatactgggtttcacactcatgtgtgcgaagtttgccaaagcctctctctgcactgctgtggctggaggtcgtcctgccttcatcggtgtggctaggcttgacggcagacttggattcacctctcaaggcacttctgacgcactcaagagagcacagcgtggagcgatctttggactctgcaagacaatagggttggagtggtcagaatctgatgtgttcagccgtggtgtggacattgctcaagggatgcacccagaagatgctgcagttgccatagttagggagatggcgtgtgctgacatcagaatcagagaggttgggattggagcaaaccagcaaagatgcacaatcagagctgccaagttggagactgggaaccctcagagacagatagcgaaagacgatgtgcttctggtttctggaggtgctcgtgggatcacacctctttgcatccgtgagatcacgcgtcagattgctggaggcaagtacattctgttgggtcgtagcaaagtttctgcgtctgaaccagcatggtgtgctggcatcactgatgagaaggctgtgcagaaagctgccacccaagagttgaagagggccttcagtgctggtgaaggacccaaacccactccaagggctgtcacgaaacttgtgggatctgttcttggtgctcgtgaagtgagaagctccattgctgccattgaagctctgggtggcaaagcgatctacagctcttgtgatgtgaactctgctgcagatgttgccaaagcagttagggatgcagagtcccagcttggtgccagagttagtggaatcgttcacgcttctggtgtgctccgtgatcgtctcatagagaagaaactccctgacgagtttgatgctgtctttgggaccaaagtcactgggttggagaatcttctggctgcagttgatcgtgccaacctcaaacacatggttctcttcagctcccttgctggtttccacggcaatgttggtcagtctgactatgcgatggcaaacgaagctctcaacaagatgggtttggaacttgcgaaggatgtcagtgtcaagtccatctgctttggtccctgggatggtgggatggtgacacctcaactcaagaaacagtttcaagaaatgggagttcagatcattcctcgtgaaggaggtgctgatacagttgcgaggattgtgttgggatcaagtcctgctgagatccttgttggaaactggaggacaccatccaagaaagttggaagtgacacgatcaccctgcatagaaagatcagtgccaagtccaatcccttcttggaggatcatgtcatacaaggcagaagggtgttgccaatgacccttgctattgggagccttgctgagacctgccttggactcttccctggctactctctctgggccatagatgacgcacagctcttcaaaggtgtcactgttgatggagacgtcaactgtgaagtgaccctcacaccgtccactgctccgagtgggagggtgaatgtccaagcgacgctcaagacgttctcaagtggaaaacttgttccagcctacagagctgtcatagtgttgtccaaccaaggtgctccacctgccaatgcaaccatgcagcctccgagccttgatgcagatcctgctttgcaagggtcagtctatgatggcaagactctctttcatggtcctgcgttcagaggcattgatgacgttctcagctgcaccaagagccagcttgttgccaagtgttctgctgttcctggatcagatgcagccagaggagagtttgcaactgacactgatgcacatgatccctttgtcaatgatcttgcctttcaagcaatgttggtctgggtgaggagaacgctgggacaagctgcactcccgaactccattcagaggatagtccaacacagaccggtcccacaagacaaacccttctacatcaccctcagatccaatcagagtggtggacatagccagcacaaacatgcacttcagttccacaacgaacaaggtgatctcttcattgatgttcaagcctctgtcattgcgacagactcacttgcgttctgagtagttagcttaatcacttaggtcaccagtatgaactaaaatgcatgtaggtgtaagagctcatggagagcatggaatattgtatccgaccatgtaacagtataataactgagctccatctcacttcttctatgaataaacaaaggatgttatgatatattaacactctatctatgcaccttattgttctatgataaatttcctcttattattataaatcatctgaatcgtgacggcttatggaatgcttcaaatagtacaaaaacaaatgtgtactataagactttctaaacaattctaactttagcattgtgaacgagacataagtgttaagaagacataacaattataatggaagaagtttgtctccatttatatattatatattacccacttatgtattatattaggatgttaaggagacataacaattataaagagagaagtttgtatccatttatatattatatactacccatttatatattatacttatccacttatttaatgtctttataaggtttgatccatgatatttctaatattttagttgatatgtatatgaaaaggtactatttgaactctcttactctgtataaaggttggatcatccttaaagtgggtctatttaattttattgcttcttacagataaaaaaaaaattatgagttggtttgataaaatattgaaggatttaaaataataataaataataaataacatataatatatgtatataaatttattataatataacatttatctataaaaaagtaaatattgtcataaatctatacaatcgtttagccttgctggaacgaatctcaattatttaaacgagagtaaacatatttgactttttggttatttaacaaattattatttaacactatatgaaattttttttttttatcagcaaagaataaaattaaattaagaaggacaatggtgtcccaatccttatacaaccaacttccacaagaaagtcaagtcagagacaacaaaaaaacaagcaaaggaaattttttaatttgagttgtcttgtttgctgcataatttatgcagtaaaacactacacataacccttttagcagtagagcaatggttgaccgtgtgcttagcttcttttattttatttttttatcagcaaagaataaataaaataaaatgagacacttcagggatgtttcaacccttatacaaaaccccaaaaacaagtttcctagcaccctaccaacgaattcgcggccgcttaattaagatgagtgatactcaggactcaggactcactctgctgatcactagtgctagcctcgaggtcgacacaactttgtatacaaaagttgtctagacctaggctcagcaactcatccagtcaagttcgagtcagtgagttgggcggccgcctcccagtatcattatagtgaaagttttggctctctcgccggtggttttttacctctatttaaaggggttttccacctaaaaattctggtatcattctcactttacttgttactttaatttctcataatctttggttgaaattatcacgcttccgcacacgatatccctacaaatttattatttgttaaacattttcaaaccgcataaaattttatgaagtcccgtctatctttaatgtagtctaacattttcatattgaaatatataatttacttaattttagcgttggtagaaagcataatgatttattcttattcttcttcatataaatgtttaatatacaatataaacaaattctttaccttaagaaggatttcccattttatattttaaaaatatatttatcaaatatttttcaaccacgtaaatctcataataataagttgtttcaaaagtaataaaatttaactccataatttttttattcgactgatcttaaagcaacacccagtgacacaactagccatttttttctttgaataaaaaaatccaattatcattgtattttttttatacaatgaaaatttcaccaaacaatgatttgtggtatttctgaagcaagtcatgttatgcaaaattctataattcccatttgacactacggaagtaactgaagatctgcttttacatgcgagacacatcttctaaagtaattttaataatagttactatattcaagatttcatatatcaaatactcaatattacttctaaaaaattaattagatataattaaaatattacttttttaattttaagtttaattgttgaatttgtgactattgatttattattctactatgtttaaattgttttatagatagtttaaagtaaatataagtaatgtagtagagtgttagagtgttaccctaaaccataaactataagatttatggtggactaattttcatatatttcttattgcttttaccttttcttggtatgtaagtccgtaactggaattactgtgggttgccatgacactctgtggtcttttggttcatgcatggatcttgcgcaagaaaaagacaaagaacaaagaaaaaagacaaaacagagagacaaaacgcaatcacacaaccaactcaaattagtcactggctgatcaagatcgccgcgtccatgtatgtctaaatgccatgcaaagcaacacgtgcttaacatgcactttaaatggctcacccatctcaacccacacacaaacacattgcctttttcttcatcatcaccacaaccacctgtatatattcattctcttccgccacctcaatttcttcacttcaacacacgtcaacctgcatatgcgtgtcatcccatgcccaaatctccatgcatgttccaaccaccttctctcttatataatacctataaatacctctaatatcactcacttctttcatcatccatccatccagagtactactactctactactataataccccaacccaactcatattcaatactactctaggatccacaaccaaaaatggctgcaaggaacgtgagtgcggctcatgagatgcatgacgagaagaggatagctgttgtgggcatggctgttcagtatgctggatgcaaaacgaaagacgagttctgggaagttctcatgaatggaaaagttgagagcaaagtgatcagcgacaaacgtcttggttcaaattaccgtgctgaacactacaaagctgaaaggagcaagtatgctgacaccttctgcaatgagacatatggaactcttgatgagaacgaaatagacaatgagcatgaactccttttgaaccttgccaaacaagccttggctgaaacatctgtcaaagattcaacaagatgtggcatagtttctggatgcctcagcttcccgatggacaacctccaaggtgaactcttgaatgtgtaccagaaccatgttgagaagaaacttggtgccagagttttcaaagatgcctctcactggtcagaaagagaacagtccaacaaaccagaggctggtgacagaagaatcttcatggaccctgcttcctttgttgctgaggaactcaatcttggcgctctccactactctgttgatgctgcctgtgccactgcgctctatgtgctcagactggcgcaagatcacttggtctctggtgcagctgatgtgatgctttgtggtgcaacatgcctgccggagccgtttttcatactctctgggttctcaaccttccaagccatgcctgttggaacgggtcagaatgtgtccatgccgctgcacaaagattctcaaggattgacccctggtgaaggaggttccatcatggtcctcaaacgtttggatgacgcaatcagagatggagatcacatctatggaacacttttgggagccaatgtcagcaacagtggcactggtctgccacttaaaccccttttgccgtcagagaaaaagtgcctcatggacacctacacacgtatcaatgtgcatccccacaagattcagtatgttgaatgccatgcaactgggactccacaaggtgatcgtgtggaaattgatgctgtgaaggcttgctttgaaggcaaagtcccacgttttggaaccacaaaagggaactttggacacacattggtggcagctgggtttgctggcatgtgcaaagtgcttctctccatgaagcacgggatcattccacccactccgggaatagatgacgaaacgaagatggaccctctggttgtctctggtgaggccattccctggccagaaacgaatggagaaccgaagcgtgctggtctctcagcgtttggatttggtgggaccaatgctcatgctgtctttgaggaacatgacccaagcaatgctgcatgcactggccatgactccatttctgctctctctgcacgttgtggtggtgagtcaaacatgagaatagcaatcactgggatggatgccacttttggtgctttgaaaggattggatgcttttgaaagggccatctacactggtgctcatggtgctataccactcccagaaaagagatggagattcctggggaaagacaaggacttccttgatctttgtggagtcaaagcaacaccgcatggctgttacattgaagatgttgaagttgatttccagaggctgaggactccaatgactcctgaagatatgctcttgcctcaacagcttctggctgtcaccacaattgatagggccatattggactctggcatgaagaaaggtggaaatgtggctgtctttgtggggttggggaccgatcttgaactctaccgtcaccgtgcaagggttgctctcaaggagagagtgaggcctgaagccagcaagaaactcaatgacatgatgcagtacatcaatgattgtgggacaagcacttcttacaccagctacataggcaacttggttgcaacaagggtcagttcacaatggggcttcacgggaccttccttcacaatcacagaaggcaacaattctgtgtacagatgtgctgaacttggcaaatacctcttggaaacgggagaggttgatggggttgtggttgcgggtgttgatctctgtgggagtgctgagaacctttacgtcaagtcaaggcgtttcaaggtgtctacatctgacaccccgagagccagctttgatgcagctgctgatggttactttgttggagagggctgtggtgcatttgtgctcaagcgtgagacaagctgcaccaaggatgacagaatctatgcttgcatggatgccatagttcctggaaatgttccatctgcatgtttgagagaggcattggatcaagccagagtcaagcctggagacatcgagatgttggagctttctgctgattcagcgaggcatttgaaggacccgtctgttctcccaaaggaactcactgctgaggaagagattggcggacttcagacgattcttcgtgacgatgacaagctcccaaggaatgttgcaactggaagtgtcaaggccactgttggtgacactggttatgcttctggtgctgccagtttgattaaggctgcgctttgcatctacaaccgttacctgcccagcaatggagatgactgggatgaacctgcacctgaagcaccctgggacagcacactctttgcgtgccagacctcaagagcttggttgaagaaccctggtgagagacgttatgcggctgtttccggagtcagtgaaaccagaagttgctacagtgtgctgctttctgaagcagagggacactacgagagagagaacagaatcagtttggatgaggaagcacccaagctcattgtgttgagagcagactcccatgaagagattcttggaagattggacaagataagggaaaggttcttgcagcccacgggtgctgcacccagagagtctgaattgaaggcgcaagcccgtaggatctttcttgaactccttggtgagacccttgcccaagatgcagcttcatctggaagtcagaagccccttgctctcagcttggtctccactccatccaagctccagagagaggtggaacttgcggcaaaaggcattccgagatgtctcaagatgagacgtgattggagttcccctgctggaagcagatatgcgcctgagcctttggccagtgacagagttgccttcatgtatggagaaggaaggagcccttactatggcatcacacaagacattcataggatttggcctgaacttcatgaggtcatcaatgagaaaacaaaccgtctctgggctgaaggtgacagatgggtcatgccaagggccagcttcaagagtgagcttgagtcacaacagcaagagtttgacagaaacatgattgaaatgttccgtcttggaatcctcacctcaattgccttcacaaacctggcgagagatgttctcaacatcacgcccaaagcagcctttggactcagtttgggagagatttccatgatctttgctttctccaagaaaaacggtttgataagcgatcagttgacaaaggatttgagagagtcagatgtctggaacaaagctctggctgttgagttcaatgcgctcagagaagcctggggcattccacagtctgtcccaaaagatgagttctggcaaggttacatagtgaggggaacgaaacaagacatagaagcagccatagcaccagactcaaagtatgtgaggttgaccatcatcaatgatgccaacactgctctcatcagtggaaagcctgatgcatgcaaagctgcgattgctcgtcttggtggcaacatccctgcgcttccagtcactcaaggcatgtgtgggcattgcccagaggtgggaccttacaccaaggacatcgcaaagatccacgccaaccttgagttccctgtggttgatggtcttgatctctggactaccataaaccagaagaggcttgtgccaagagccacgggtgccaaagatgaatgggctccttcatcctttggggagtatgctggacagctctatgagaaacaagccaacttccctcagatagttgaaaccatctacaagcagaactatgatgtgtttgttgaagttgggccaaacaatcacagaagcacagcagtgagaaccacgcttggaccacagagaaaccaccttgctggtgccatagacaagcagaacgaggatgcttggacgacaatagtcaagctcgtggcttcattgaaggctcaccttgttcctggagtgaccatcagtccgctctaccactccaagctcgttgcagaggctgaggcttgttatgctgcgctctgtaaaggtgagaaacccaagaaaaacaagtttgtgagaaagattcagttgaatggcagattcaacagcaaggcagaccccatctcctcagcagaccttgcatccttcccacctgcggaccctgcgattgaagctgccatctcttcaaggatcatgaagcctgtggctccgaaattctatgcgcgtctcaacattgatgagcaagatgagaccagagatccgatcttgaacaaggacaatgcgccttccagctccagctcttccagcagttcctcttccagcagttcatctccgtctcctgctccttcagctccagttcagaagaaagctgccccagctgcggagacaaaagctgttgccagtgctgatgcacttcgtagtgccctgcttgatcttgactccatgcttgcgctcagctctgcaagtgcttctggcaaccttgttgagactgcgccatctgatgccagtgtcattgtccctccgtgcaacattgctgatcttggcagcagagctttcatgaaaacttatggtgtttctgcgcctctgtacaccggtgcaatggccaagggaattgcctctgcggacttggtgatcgcagctggaaggcaaggaatccttgcgtcatttggtgctggaggccttccaatgcaagttgtgcgtgagtccattgaaaagattcaagctgccctgcccaatggaccatatgctgtcaacctcatccattctccttttgacagcaaccttgagaagggaaatgttgatctcttcttggaaaagggtgtcacttttgttgaggcttcagccttcatgacgttgacaccgcaagttgtcagatacagagcggctgggttgacgaggaatgcagatgggtcagtcaacataaggaacagaatcattgggaaagtctccagaactgagctggctgaaatgttcatgcgtcctgcacctgagcatcttttgcagaagctcattgcttctggggagatcaatcaagaacaagctgagttggccagacgtgttcctgtggctgatgacattgcggttgaagctgattctggtggacacactgacaaccgtccaatccatgtcattctgcctctgattatcaacctgagggataggcttcacagagagtgtggatacccagcaaacctgagggttcgtgttggtgctgggggtggcattgggtgtccccaagctgcgctggcaactttcaacatgggtgcctctttcattgtcactggaacagtgaaccaagttgccaaacaatctgggacgtgtgacaatgtgaggaaacagcttgcgaaagcaacttactcagatgtttgcatggcaccggcagctgacatgtttgaggaaggtgtgaaacttcaagttttgaagaaaggaacaatgttcccttcaagagccaacaaactctatgagttgttctgcaagtatgattcttttgagtccatgcctccagcagagcttgcgagggttgagaaaagaatcttcagtcgtgcattggaagaggtctgggatgagaccaagaacttctacatcaaccgtctccacaacccagagaagatacagagggctgagagggaccccaaactgaagatgtcactgtgtttcagatggtatctgtccctggcttcaaggtgggccaacactggagcttctgacagagtcatggactaccaagtttggtgtggtcctgccattggttcattcaatgatttcatcaaaggaacttaccttgatccggcagtggcaaatgagtacccgtgtgttgtgcagatcaacaaacagattcttagaggagcgtgcttcttgaggcgtcttgaaatactgagaaatgcaaggctttcagatggtgcagctgcacttgtggcgagcattgatgacacatatgtccctgctgagaagctgtgagtagttagcttaatcacttaggtcaccagtatgaactaaaatgcatgtaggtgtaagagctcatggagagcatggaatattgtatccgaccatgtaacagtataataactgagctccatctcacttcttctatgaataaacaaaggatgttatgatatattaacactctatctatgcaccttattgttctatgataaatttcctcttattattataaatcatctgaatcgtgacggcttatggaatgcttcaaatagtacaaaaacaaatgtgtactataagactttctaaacaattctaactttagcattgtgaacgagacataagtgttaagaagacataacaattataatggaagaagtttgtctccatttatatattatatattacccacttatgtattatattaggatgttaaggagacataacaattataaagagagaagtttgtatccatttatatattatatactacccatttatatattatacttatccacttatttaatgtctttataaggtttgatccatgatatttctaatattttagttgatatgtatatgaaaaggtactatttgaactctcttactctgtataaaggttggatcatccttaaagtgggtctatttaattttattgcttcttacagataaaaaaaaaattatgagttggtttgataaaatattgaaggatttaaaataataataaataataaataacatataatatatgtatataaatttattataatataacatttatctataaaaaagtaaatattgtcataaatctatacaatcgtttagccttgctggaacgaatctcaattatttaaacgagagtaaacatatttgactttttggttatttaacaaattattatttaacactatatgaaattttttttttttatcagcaaagaataaaattaaattaagaaggacaatggtgtcccaatccttatacaaccaacttccacaagaaagtcaagtcagagacaacaaaaaaacaagcaaaggaaattttttaatttgagttgtcttgtttgctgcataatttatgcagtaaaacactacacataacccttttagcagtagagcaatggttgaccgtgtgcttagcttcttttattttatttttttatcagcaaagaataaataaaataaaatgagacacttcagggatgtttcaacccttatacaaaaccccaaaaacaagtttcctagcaccctaccaacgaattcgcggccgcttaattaatctgacctgaccactagacctgagtgagtacagatgtgctactagtgctagcctcgaggtcgaccaacttttctatacaaagttgtctagacctaggactaggcactgagtgactcactgacctgactgagtgactggcggccgcctcccagtatcattatagtgaaagttttggctctctcgccggtggttttttacctctatttaaaggggttttccacctaaaaattctggtatcattctcactttacttgttactttaatttctcataatctttggttgaaattatcacgcttccgcacacgatatccctacaaatttattatttgttaaacattttcaaaccgcataaaattttatgaagtcccgtctatctttaatgtagtctaacattttcatattgaaatatataatttacttaattttagcgttggtagaaagcataatgatttattcttattcttcttcatataaatgtttaatatacaatataaacaaattctttaccttaagaaggatttcccattttatattttaaaaatatatttatcaaatatttttcaaccacgtaaatctcataataataagttgtttcaaaagtaataaaatttaactccataatttttttattcgactgatcttaaagcaacacccagtgacacaactagccatttttttctttgaataaaaaaatccaattatcattgtattttttttatacaatgaaaatttcaccaaacaatgatttgtggtatttctgaagcaagtcatgttatgcaaaattctataattcccatttgacactacggaagtaactgaagatctgcttttacatgcgagacacatcttctaaagtaattttaataatagttactatattcaagatttcatatatcaaatactcaatattacttctaaaaaattaattagatataattaaaatattacttttttaattttaagtttaattgttgaatttgtgactattgatttattattctactatgtttaaattgttttatagatagtttaaagtaaatataagtaatgtagtagagtgttagagtgttaccctaaaccataaactataagatttatggtggactaattttcatatatttcttattgcttttaccttttcttggtatgtaagtccgtaactggaattactgtgggttgccatgacactctgtggtcttttggttcatgcatggatcttgcgcaagaaaaagacaaagaacaaagaaaaaagacaaaacagagagacaaaacgcaatcacacaaccaactcaaattagtcactggctgatcaagatcgccgcgtccatgtatgtctaaatgccatgcaaagcaacacgtgcttaacatgcactttaaatggctcacccatctcaacccacacacaaacacattgcctttttcttcatcatcaccacaaccacctgtatatattcattctcttccgccacctcaatttcttcacttcaacacacgtcaacctgcatatgcgtgtcatcccatgcccaaatctccatgcatgttccaaccaccttctctcttatataatacctataaatacctctaatatcactcacttctttcatcatccatccatccagagtactactactctactactataataccccaacccaactcatattcaatactactctaggatccacaaccaaaaatggcgcttcgtgtcaagaccaacaagaagccatgttgggagatgaccaaggaggaactgacctctggcaaaactgaggtgttcaactatgaggaactcctggagtttgcagagggtgacatagctaaggtttttggtccggagtttgctgtcatagacaagtaccccagaagggtgaggctgcctgctcgtgaatacctgcttgtgacaagggtcacactcatggatgccgaggtcaacaactacagagttggtgccagaatggtcactgagtatgatcttccagtgaatggcgaattgtctgagggaggtgattgtccctgggcagttctggttgagagtggacagtgcgatttgatgctgatatcatacatgggaattgatttccagaaccaaggtgacagagtttaccgtctgctcaacaccacgttgacattctatggggttgcccatgagggagagacccttgagtatgacatcagagtgaccggttttgccaaacgtttggatggtggcatctccatgttcttctttgagtatgactgctatgtcaatgggaggcttctcattgagatgagagatggctgtgctggcttcttcacaaatgaggagcttgatgcgggaaagggtgtggtgttcacaagaggggatttggctgccagagctaagattccaaagcaagatgtttctccctatgctgtcgctccctgccttcacaaaacaaaactcaacgaaaaggagatgcagaccttggttgacaaagattgggcttccgtttttggctcaaagaatggcatgccggagatcaactacaaactctgcgcacgtaagatgctcatgattgatagagtcaccagcattgaccataagggaggtgtgtacggtttgggtcagttggttggtgagaaaatcttggagagggaccattggtacttcccatgccattttgttaaggatcaagtcatggctggatctcttgtcagcgacggttgttcacaaatgctcaagatgtacatgatctggctcggtttgcaccttaccaccggaccatttgacttcagacccgtcaacggacacccgaacaaagttaggtgtaggggtcagatatctcctcataagggaaagttggtctacgtcatggagatcaaagagatgggattcgacgaggataacgatccgtacgccattgctgacgtcaacatcattgacgttgatttcgaaaagggtcaagatttcagccttgatagaatcagcgactacggaaagggggatcttaacaaaaagatcgtcgtggacttcaagggcattgctctcaagatgcagaagagatccacgaacaagaacccctccaaagttcagcccgtttttgctaacggtgcagccactgtgggaccggaagcgtccaaggccagctctggtgccagtgctagtgcttctgctgcccctgcgaagcctgctttctcagcagatgttcttgcgccaaagccagttgcacttcctgaacatatcctcaagggtgacgctctcgctccgaaagaaatgtcctggcatcccatgtcaaaacttcctggcaacccgacgccgttcttctcccctagttcttaccctccgagggcaatttgcttcatccctttccctggcaacccacttgacaacaattgcaaagctggagaaatgcctctgaactggtacaacatgtcagagttcatgtgtggaaaagttagcaactgcttgggaccagagttcgcaagatttgataagtcaaatacgagcagaagccctgcttttgatttggctcttgtgactagagttgttgaagtcacaaacatggaacatggcaagttcctgaatgttgattgcaatcccagcaaaggcacaatggtgggggagtttgactgtcctcaagatgcgtggttctttgatggttcttgcaatgatgggcacatgccttattccatcatcatggaaatcggacttcagacatccggtgttctcaccagtgtgttgaaagcaccactgacgatggacaaagatgacattctctttaggaaccttgatgcaagtgctgaaatggtgaggccagatgtggatgtgagggggaaaaccataaggaatgtgaccaagtgcactggatatgcaatgttgggaaagatggggattcacagattcacgtttgagttgtctgttgatggcgtggttttctacaaaggaagcacttcctttggatggttcactccagaggtgtttgctcagcaagctggacttgacaatgggaaaaagacggagccttggtgcaaaactaacaacacgagtgtgagaagagttgaaatcgcatcagccaaaggcaaagaacagctgactgagaaacttccagatgcaactaatgctcaagttctcagaaggtcagaacagtgtgagtatttggattacctcaacattgctcctgattctgggctgcatgggaaaggatatgcgcatggacacaaagatgttaacccacaagactggttcttctcttgtcacttttggtttgatcctgtgatgcctggatctttgggaattgagtcaatgttccagctcattgaggcatttgcggtggaccagaacataccgggagaatacaatgtgagcaatccgacctttgcccatgcccctggaaaaacggcgtggaagtaccgtggtcaattgacaccaaagaaccgtgcgatggactgtgaggtgcacatagtttcaatcacagcctctcctgaaaatggaggctacgttgacatagtggcagatggagcactttgggttgatggtctccgtgtgtatgaagccaaagaactcagagttcgtgttgtcagtgcaaaacctcaagccattccggatgttcaacaacagccacccagcgcaaaagcggaccctgggaaaactggagttgcactcagtccgactcagttgagagatgtcctgcttgaagtggacaatccattgtatcttggtgttgaaaactccaatttggtgcagtttgaatccaaacctgcaacttcttcaaggattgtcagtatcaaaccatgctccataagtgatcttggtgacaagtccttcatggaaacgtacaatgtgtcagcacctctgtacactggagcaatggccaagggaattgcgtctgcggaccttgtcattgctgctgggaagaggaagatattgggttcttttggagcgggtgggcttccaatgcaccatgtgagggcagctttggagaagatacaagcggctctgcctcaaggaccatatgctgtgaacctcattcattcaccttttgacagcaacttggaaaaggggaatgttgatctcttcctcgaaaagggcgttactgtggtggaggcttctgcattcatgaccctcactccccaagttgttcgttaccgtgcagccggactctcaaggaacgctgatgggagtgtcaacatcagaaaccgtatcattggaaaagtgtccagaacagaactcgccgaaatgttcatcagaccggctccggaacacctccttgagaaactcatagcttctggtgagataacacaagaacaagccgaacttgcccgtcgtgttcctgtcgcagacgacatcgctgttgaagctgattctggtggtcacactgacaaccgtcccatccacgtcatcttgcctttgatcatcaaccttaggaacagactgcacagagagtgtggttatcctgcgcaccttagagtcagagttggagctggaggcggtgttggctgcccacaagctgctgcggctgccctcacaatgggagctgccttcatagtgactgggactgtcaatcaagttgctaaacagtccgggacatgtgacaacgtgagaaaacaactcagtcaagccacctacagtgacatttgcatggctccagcagctgatatgtttgaggaaggtgtgaaactccaagttctcaagaagggaacaatgttcccatcaagagctaacaaattgtacgaactcttttgcaagtacgactctttcgattcaatgcctcctgctgaacttgaaaggatcgagaagaggatcttcaagagggcacttcaagaggtctgggaagagaccaaggacttttacatcaatggtttgaagaatccagagaagatacagagagcggaacatgaccccaaactcaagatgtctttgtgtttcagatggtatcttggtcttgcatcacgttgggccaacatgggtgctcctgatcgtgtcatggactatcaagtctggtgtggtccagccattggagccttcaatgacttcatcaaaggaacatatcttgatcctgctgtctctaatgagtacccatgtgttgtccagatcaaccttcagattttgcgtggtgcatgttacctgaggcgtcttaatgctctgagaaatgatccgaggattgatcttgagactgaagatgctgcctttgtctatgagccaacgaatgcgctttgagtagttagcttaatcacttaggtcaccagtatgaactaaaatgcatgtaggtgtaagagctcatggagagcatggaatattgtatccgaccatgtaacagtataataactgagctccatctcacttcttctatgaataaacaaaggatgttatgatatattaacactctatctatgcaccttattgttctatgataaatttcctcttattattataaatcatctgaatcgtgacggcttatggaatgcttcaaatagtacaaaaacaaatgtgtactataagactttctaaacaattctaactttagcattgtgaacgagacataagtgttaagaagacataacaattataatggaagaagtttgtctccatttatatattatatattacccacttatgtattatattaggatgttaaggagacataacaattataaagagagaagtttgtatccatttatatattatatactacccatttatatattatacttatccacttatttaatgtctttataaggtttgatccatgatatttctaatattttagttgatatgtatatgaaaaggtactatttgaactctcttactctgtataaaggttggatcatccttaaagtgggtctatttaattttattgcttcttacagataaaaaaaaaattatgagttggtttgataaaatattgaaggatttaaaataataataaataataaataacatataatatatgtatataaatttattataatataacatttatctataaaaaagtaaatattgtcataaatctatacaatcgtttagccttgctggaacgaatctcaattatttaaacgagagtaaacatatttgactttttggttatttaacaaattattatttaacactatatgaaattttttttttttatcagcaaagaataaaattaaattaagaaggacaatggtgtcccaatccttatacaaccaacttccacaagaaagtcaagtcagagacaacaaaaaaacaagcaaaggaaattttttaatttgagttgtcttgtttgctgcataatttatgcagtaaaacactacacataacccttttagcagtagagcaatggttgaccgtgtgcttagcttcttttattttatttttttatcagcaaagaataaataaaataaaatgagacacttcagggatgtttcaacccttatacaaaaccccaaaaacaagtttcctagcaccctaccaacgaattcgcggccgcttaattaatcacgagtggatgactgtcacgactgactcatgactgactactagtgctagcctcgaggtcgacacaactttgtataataaagttgtctagacctaggagctgtgctgggtaactcacatgagtcactggtcacatcagcggccgcctcccagtatcattatagtgaaagttttggctctctcgccggtggttttttacctctatttaaaggggttttccacctaaaaattctggtatcattctcactttacttgttactttaatttctcataatctttggttgaaattatcacgcttccgcacacgatatccctacaaatttattatttgttaaacattttcaaaccgcataaaattttatgaagtcccgtctatctttaatgtagtctaacattttcatattgaaatatataatttacttaattttagcgttggtagaaagcataatgatttattcttattcttcttcatataaatgtttaatatacaatataaacaaattctttaccttaagaaggatttcccattttatattttaaaaatatatttatcaaatatttttcaaccacgtaaatctcataataataagttgtttcaaaagtaataaaatttaactccataatttttttattcgactgatcttaaagcaacacccagtgacacaactagccatttttttctttgaataaaaaaatccaattatcattgtattttttttatacaatgaaaatttcaccaaacaatgatttgtggtatttctgaagcaagtcatgttatgcaaaattctataattcccatttgacactacggaagtaactgaagatctgcttttacatgcgagacacatcttctaaagtaattttaataatagttactatattcaagatttcatatatcaaatactcaatattacttctaaaaaattaattagatataattaaaatattacttttttaattttaagtttaattgttgaatttgtgactattgatttattattctactatgtttaaattgttttatagatagtttaaagtaaatataagtaatgtagtagagtgttagagtgttaccctaaaccataaactataagatttatggtggactaattttcatatatttcttattgcttttaccttttcttggtatgtaagtccgtaactggaattactgtgggttgccatgacactctgtggtcttttggttcatgcatggatcttgcgcaagaaaaagacaaagaacaaagaaaaaagacaaaacagagagacaaaacgcaatcacacaaccaactcaaattagtcactggctgatcaagatcgccgcgtccatgtatgtctaaatgccatgcaaagcaacacgtgcttaacatgcactttaaatggctcacccatctcaacccacacacaaacacattgcctttttcttcatcatcaccacaaccacctgtatatattcattctcttccgccacctcaatttcttcacttcaacacacgtcaacctgcatatgcgtgtcatcccatgcccaaatctccatgcatgttccaaccaccttctctcttatataatacctataaatacctctaatatcactcacttctttcatcatccatccatccagagtactactactctactactataataccccaacccaactcatattcaatactactctaggatccacaaccaaaaatgcttcagcacacttggcttccgaagcctcccaatctgaccctcttgtcagatgaggttcatctctggaggattcctcttgaccagcctgagtcacaacttcaagaccttgctgccaccctgagcagtgatgaattggcgagggcaaacagattctactttccagaacacagaaggcgtttcactgctgggagaggcatcctcagatccatcttgggtggatacttgggagtggaaccgggtcaagtcaagtttgattatgagtcccgtgggaaaccgatccttggtgacagatttgctgagagtggactcctgttcaacttgtctcacagccagaaccttgccttgtgtgctgtcaactacacgcgtcaaataggcattgatcttgaatatctgcgtccaacatctgacttggagtctcttgcaaagaggttctttctcccaagagaatatgaactcttgaggtcactccctgatgagcagaaacagaagattttctttcgttactggacttgcaaagaggcttatctcaaagcaacgggagatggaatagccaaacttgaagagatcgagatagcactcaccccaacagaacctgccaagctccaaacagctcctgcgtggtctctgttggagcttgtgccagatgacaattgtgttgcagctgtggctgttgcgggttttggttggcagcccaagttctggcattactgagtagttagcttaatcacttaggtcaccagtatgaactaaaatgcatgtaggtgtaagagctcatggagagcatggaatattgtatccgaccatgtaacagtataataactgagctccatctcacttcttctatgaataaacaaaggatgttatgatatattaacactctatctatgcaccttattgttctatgataaatttcctcttattattataaatcatctgaatcgtgacggcttatggaatgcttcaaatagtacaaaaacaaatgtgtactataagactttctaaacaattctaactttagcattgtgaacgagacataagtgttaagaagacataacaattataatggaagaagtttgtctccatttatatattatatattacccacttatgtattatattaggatgttaaggagacataacaattataaagagagaagtttgtatccatttatatattatatactacccatttatatattatacttatccacttatttaatgtctttataaggtttgatccatgatatttctaatattttagttgatatgtatatgaaaaggtactatttgaactctcttactctgtataaaggttggatcatccttaaagtgggtctatttaattttattgcttcttacagataaaaaaaaaattatgagttggtttgataaaatattgaaggatttaaaataataataaataataaataacatataatatatgtatataaatttattataatataacatttatctataaaaaagtaaatattgtcataaatctatacaatcgtttagccttgctggaacgaatctcaattatttaaacgagagtaaacatatttgactttttggttatttaacaaattattatttaacactatatgaaattttttttttttatcagcaaagaataaaattaaattaagaaggacaatggtgtcccaatccttatacaaccaacttccacaagaaagtcaagtcagagacaacaaaaaaacaagcaaaggaaattttttaatttgagttgtcttgtttgctgcataatttatgcagtaaaacactacacataacccttttagcagtagagcaatggttgaccgtgtgcttagcttcttttattttatttttttatcagcaaagaataaataaaataaaatgagacacttcagggatgtttcaacccttatacaaaaccccaaaaacaagtttcctagcaccctaccaacgaattcgcggccgcttaattaactactgtcactgaggccgtagacgagtacggactgatctaactagtgctagcctcgaggtcgacacccagctttcttgtacaaagtggttgcggccgcttaattaaatttaaattcaattaatgcaatcttgattttcaacaacgaaggtaatggcgtaaaagaaaaaatgtatgttattgtattgatctttcatgatgttgaagcgtgccataatatgatgatgtataattaaaatattaactgtcgcattttattgaaatggcactgttatttcaaccatatctttgattctgttacatgacacgactgcaagaagtaaataatagacgccgttgttaaagaattgctatcatatgtgcctaactagagggaatttgagcgtcagacctaatcaaatattacaaaatatctcactctgtcgccagcaatggtgtaatcagcgcagacaaatggcgtaaagatcgcggaaaaacctccccgagtggcatgatagctgcctctgtattgctgatttagtcagccttatttgacttaagggtgccctcgttagtgacaaattgctttcaaggagacagccatgccccacactttgttgaaaaacaaattgcctttggggagacggtaaagccagttgctcttcaataaggaatgtcgaggaggcaatgtaaccgcctctggtagtacacttctctaatccaaaaatcaatttgtattcaagataccgcaaaaaacttatggtttaaaccctgcaggactagtccagaaggtaattatccaagatgtagcatcaagaatccaatgtttacgggaaaaactatggaagtattatgtaagctcagcaagaagcagatcaatatgcggcacatatgcaacctatgttcaaaaatgaagaatgtacagatacaagatcctatactgccagaatacgaagaagaatacgtagaaattgaaaaagaagaaccaggcgaagaaaagaatcttgaagacgtaagcactgacgacaacaatgaaaagaagaagataaggtcggtgattgtgaaagagacatagaggacacatgtaaggtggaaaatgtaagggcggaaagtaaccttatcacaaaggaatcttatcccccactacttatccttttatatttttccgtgtcatttttgcccttgagttttcctatataaggaaccaagttcggcatttgtgaaaacaagaaaaaatttggtgtaagctattttctttgaagtactgaggatacaacttcagagaaatttgtaagtttgtaggtaccagatctggatcccaaaccatgtctccggagaggagaccagttgagattaggccagctacagcagctgatatggccgcggtttgtgatatcgttaaccattacattgagacgtctacagtgaactttaggacagagccacaaacaccacaagagtggattgatgatctagagaggttgcaagatagatacccttggttggttgctgaggttgagggtgttgtggctggtattgcttacgctgggccctggaaggctaggaacgcttacgattggacagttgagagtactgtttacgtgtcacataggcatcaaaggttgggcctaggatctacattgtacacacatttgcttaagtctatggaggcgcaaggttttaagtctgtggttgctgttataggccttccaaacgatccatctgttaggttgcatgaggctttgggatacacagcccggggtacattgcgcgcagctggatacaagcatggtggatggcatgatgttggtttttggcaaagggattttgagttgccagctcctccaaggccagttaggccagttacccaaatctgagtagttagcttaatcacctagagctcgatcggcggcaatagcttcttagcgccatcccgggttgatcctatctgtgttgaaatagttgcggtgggcaaggctctctttcagaaagacaggcggccaaaggaacccaaggtgaggtgggctatggctctcagttccttgtggaagcgcttggtctaaggtgcagaggtgttagcgggatgaagcaaaagtgtccgattgtaacaagatatgttgatcctacgtaaggatattaaagtatgtattcatcactaatataatcagtgtattccaatatgtactacgatttccaatgtctttattgtcgccgtatgtaatcggcgtcacaaaataatccccggtgactttcttttaatccaggatgaaataatatgttattataatttttgcgatttggtccgttataggaattgaagtgtgcttgaggtcggtcgccaccactcccatttcataattttacatgtatttgaaaaataaaaatttatggtattcaatttaaacacgtatacttgtaaagaatgatatcttgaaagaaatatagtttaaatatttattgataaaataacaagtcaggtattatagtccaagcaaaaacataaatttattgatgcaagtttaaattcagaaatatttcaataactgattatatcagctggtacattgccgtagatgaaagactgagtgcgatattatggtgtaatacataggaattcgtttaaacgatctgcgtctaattttcggtccaacttgcacaggaaagacgtcgaccgcggtagctcttgcccagcagactgggcttccagtcctttcgctcgatcgggtccaatgttgtcctcagctgtgaaccggaagcggacgaccaacagtggaagaactgaaaggaacgagccgtctataccttgatgatcggcctctggtgaagggtatcatcgcagccaagcaagctcatgaaaggctgatgggggaggtgtataattatgaggcccacggcgggcttattctttagggaggatctatctcgttgctcaagtgcatggcgcaaagcagttattggagtgcggattttcgttggcatattattcgccacgagttagcagacgaagagaccttcatgaacgtggccaaggccagagttaagcagatgttacgccctgctgcaggcctttctattatccaatagttggttgatctttggaaagagcctcggctgaggcccatactgaaagagatcgatggatatcgatatgccatgttgtttgctagccagaaccagatcacatccgatatgctattgcagcttgacgcagatatggaggataagttgattcatgggatcgctcaggagtagctcatccatgcacgccgacaagaacagaaattccgtcgagttaacgcagccgcttacgacggattcgaaggtcatccattcggaatgtattagtttgcaccagctccgcgtcacacctgtcttcatttgaataagatgttagcaattgtttttagctttgtcttgttgtggcagggcggcaagtgcttcagacatcattctgttttcaaattttatgctggagaacagcttcttaattcctttggaaataatagactgcgtcttaaaattcagatgtctggatatagatatgattgtaaaataacctatttaagtgtcatttagaacataagttttatgaatgttcttccattttcgtcatcgaacgaataagagtaaatacaccttttttaacattacaaataagttcttatacgttgtttatacaccgggaatcatttccattattttcgcgcaaaagtcacggatattcgtgaaagcgacataaactgcgaaatttgcggggagtgtcttgagtttgcctcgaggctagcgcatgcacatagacacacacatcatctcattgatgcttggtaataattgtcattagattgtttttatgcatagatgcactcgaaatcagccaattttagacaagtatcaaacggatgtgacttcagtacattaaaaacgtccgcaatgtgttattaagttgtctaagcgtcaatttgatttacaattgaatatatcctgccccagccagccaacagctcgatttacaattgaatatatcctgccggccggcccacgcgtgtcgaggaattctgatctggcccccatttggacgtgaatgtagacacgtcgaaataaagatttccgaattagaataatttgtttattgctttcgcctataaatacgacggatcgtaatttgtcgttttatcaaaatgtactttcattttataataacgctgcggacatctacatttttgaattgaaaaaaaattggtaattactctttctttttctccatattgaccatcatactcattgctgatccatgtagatttcccggacatgaagccatttacaattgaatatatcctgccgccgctgccgctttgcacccggtggagcttgcatgttggtttctacgcagaactgagccggttaggcagataatttccattgagaactgagccatgtgcaccttccccccaacacggtgagcgacggggcaacggagtgatccacatgggacttttaaacatcatccgtcggatggcgttgcgagagaagcagtcgatccgtgagatcagccgacgcaccgggcaggcgcgcaacacgatcgcaaagtatttgaacgcaggtacaatcgagccgacgttcacgcggaacgaccaagcaagcttggctgccatttttggggtgaggccgttcgcggccgaggggcgcagcccctggggggatgggaggcccgcgttagcgggccgggagggttcgagaagggggggcaccccccttcggcgtgcgcggtcacgcgcacagggcgcagccctggttaaaaacaaggtttataaatattggtttaaaagcaggttaaaagacaggttagcggtggccgaaaaacgggcggaaacccttgcaaatgctggattttctgcctgtggacagcccctcaaatgtcaataggtgcgcccctcatctgtcagcactctgcccctcaagtgtcaaggatcgcgcccctcatctgtcagtagtcgcgcccctcaagtgtcaataccgcagggcacttatccccaggcttgtccacatcatctgtgggaaactcgcgtaaaatcaggcgttttcgccgatttgcgaggctggccagctccacgtcgccggccgaaatcgagcctgcccctcatctgtcaacgccgcgccgggtgagtcggcccctcaagtgtcaacgtccgcccctcatctgtcagtgagggccaagttttccgcgaggtatccacaacgccggcggccgcggtgtctcgcacacggcttcgacggcgtttctggcgcgtttgcagggccatagacggccgccagcccagcggcgagggcaaccagcccggtgagcgtcggaaagggtcgacggatcttttccgctgcataaccctgcttcggggtcattatagcgattttttcggtatatccatcctttttcgcacgatatacaggattttgccaaagggttcgtgtagactttccttggtgtatccaacggcgtcagccgggcaggataggtgaagtaggcccacccgcgagcgggtgttccttcttcactgtcccttattcgcacctggcggtgctcaacgggaatcctgctctgcgaggctggccggctaccgccggcgtaacagatgagggcaagcggatggctgatgaaaccaagccaaccaggaagggcagcccacctatcaaggtgtactgccttccagacgaacgaagagcgattgaggaaaaggcggcggcggccggcatgagcctgtcggcctacctgctggccgtcggccagggctacaaaatcacgggcgtcgtggactatgagcacgtccgcgagctggcccgcatcaatggcgacctgggccgcctgggcggcctgctgaaactctggctcaccgacgacccgcgcacggcgcggttcggtgatgccacgatcctcgccctgctggcgaagatcgaagagaagcaggacgagcttggcaaggtcatgatgggcgtggtccgcccgagggcagagccatgacttttttagccgctaaaacggccggggggtgcgcgtgattgccaagcacgtccccatgcgctccatcaagaagagcgacttcgcggagctggtattcgtgcagggcaagattcggaataccaagtacgagaaggacggccagacggtctacgggaccgacttcattgccgataaggtggattatctggacaccaaggcaccaggcgggtcaaatcaggaataagggcacattgccccggcgtgagtcggggcaatcccgcaaggagggtgaatgaatcggacgtttgaccggaaggcatacaggcaagaactgatcgacgcggggttttccgccgaggatgccgaaaccatcgcaagccgcaccgtcatgcgtgcgccccgcgaaaccttccagtccgtcggctcgatggtccagcaagctacggccaagatcgagcgcgacagcgtgcaactggctccccctgccctgcccgcgccatcggccgccgtggagcgttcgcgtcgtctcgaacaggaggcggcaggtttggcgaagtcgatgaccatcgacacgcgaggaactatgacgaccaagaagcgaaaaaccgccggcgaggacctggcaaaacaggtcagcgaggccaagcaggccgcgttgctgaaacacacgaagcagcagatcaaggaaatgcagctttccttgttcgatattgcgccgtggccggacacgatgcgagcgatgccaaacgacacggcccgctctgccctgttcaccacgcgcaacaagaaaatcccgcgcgaggcgctgcaaaacaaggtcattttccacgtcaacaaggacgtgaagatcacctacaccggcgtcgagctgcgggccgacgatgacgaactggtgtggcagcaggtgttggagtacgcgaagcgcacccctatcggcgagccgatcaccttcacgttctacgagctttgccaggacctgggctggtcgatcaatggccggtattacacgaaggccgaggaatgcctgtcgcgcctacaggcgacggcgatgggcttcacgtccgaccgcgttgggcacctggaatcggtgtcgctgctgcaccgcttccgcgtcctggaccgtggcaagaaaacgtcccgttgccaggtcctgatcgacgaggaaatcgtcgtgctgtttgctggcgaccactacacgaaattcatatgggagaagtaccgcaagctgtcgccgacggcccgacggatgttcgactatttcagctcgcaccgggagccgtacccgctcaagctggaaaccttccgcctcatgtgcggatcggattccacccgcgtgaagaagtggcgcgagcaggtcggcgaagcctgcgaagagttgcgaggcagcggcctggtggaacacgcctgggtcaatgatgacctggtgcattgcaaacgctagggccttgtggggtcagttccggctgggggttcagcagccagcgctttactggcatttcaggaacaagcgggcactgctcgacgcacttgcttcgctcagtatcgctcgggacgcacggcgcgctctacgaactgccgataaacagaggattaaaattgacaattgtgattaaggctcagattcgacggcttggagcggccgacgtgcaggatttccgcgagatccgattgtcggccctgaagaaagctccagagatgttcgggtccgtttacgagcacgaggagaaaaagcccatggaggcgttcgctgaacggttgcgagatgccgtggcattcggcgcctacatcgacggcgagatcattgggctgtcggtcttcaaacaggaggacggccccaaggacgctcacaaggcgcatctgtccggcgttttcgtggagcccgaacagcgaggccgaggggtcgccggtatgctgctgcgggcgttgccggcgggtttattgctcgtgatgatcgtccgacagattccaacgggaatctggtggatgcgcatcttcatcctcggcgcacttaatatttcgctattctggagcttgttgtttatttcggtctaccgcctgccgggcggggtcgcggcgacggtaggcgctgtgcagccgctgatggtcgtgttcatctctgccgctctgctaggtagcccgatacgattgatggcggtcctgggggctatttgcggaactgcgggcgtggcgctgttggtgttgacaccaaacgcagcgctagatcctgtcggcgtcgcagcgggcctggcgggggcggtttccatggcgttcggaaccgtgctgacccgcaagtggcaacctcccgtgcctctgctcacctttaccgcctggcaactggcggccggaggacttctgctcgttccagtagctttagtgtttgatccgccaatcccgatgcctacaggaaccaatgttctcggcctggcgtggctcggcctgatcggagcgggtttaacctacttcctttggttccgggggatctcgcgactcgaacctacagttgtttccttactgggctttctcagcccccgagcgcttagtgggaatttgtaccccttatcgaaccgggagcacaggatgacgcctaacaattcattcaagccgacaccgcttcgcggcgcggcttaattcaggagttaaacatcatgagggaagcggtgatcgccgaagtatcgactcaactatcagaggtagttggcgtcatcgagcgccatctcgaaccgacgttgctggccgtacatttgtacggctccgcagtggatggcggcctgaagccacacagtgatattgatttgctggttacggtgaccgtaaggcttgatgaaacaacgcggcgagctttgatcaacgaccttttggaaacttcggcttcccctggagagagcgagattctccgcgctgtagaagtcaccattgttgtgcacgacgacatcattccgtggcgttatccagctaagcgcgaactgcaatttggagaatggcagcgcaatgacattcttgcaggtatcttcgagccagccacgatcgacattgatctggctatcttgctgacaaaagcaagagaacatagcgttgccttggtaggtccagcggcggaggaactctttgatccggttcctgaacaggatctatttgaggcgctaaatgaaaccttaacgctatggaactcgccgcccgactgggctggcgatgagcgaaatgtagtgcttacgttgtcccgcatttggtacagcgcagtaaccggcaaaatcgcgccgaaggatgtcgctgccgactgggcaatggagcgcctgccggcccagtatcagcccgtcatacttgaagctaggcaggcttatcttggacaagaagatcgcttggcctcgcgcgcagatcagttggaagaatttgttcactacgtgaaaggcgagatcaccaaggtagtcggcaaataatgtctaacaattcgttcaagccgacgccgcttcgcggcgcggcttaactcaagcgttagagagctggggaagactatgcgcgatctgttgaaggtggttctaagcctcgtcttgcgatggcatttcgatccattcccattccgcgctcaagatggcttcccctcggcagttcatcagggctaaatcaatctagccgacttgtccggtgaaatgggctgcactccaacagaaacaatcaaacaaacatacacagcgacttattcacacgagctcaaattacaacggtatatatcctgccagtcagcatcatcacaccaaaagttaggcccgaatagtttgaaattagaaagctcgcaattgaggtctacaggccaaattcgctcttagccgtacaatattactcaccggatcctaaccggtttaattaaggcgcgccatgcccgggcaagcggccgcacaagttt

SEQ ID NO: 47 - DNA, 36797 bp, Artificial sequence
  plasmid pDAB9338
cttgtacaaagtggttgcggccgcttaattaaatttaaattcaattaatgcaatcttgattttcaacaacgaaggtaatggcgtaaaagaaaaaatgtatgttattgtattgatctttcatgatgttgaagcgtgccataatatgatgatgtataattaaaatattaactgtcgcattttattgaaatggcactgttatttcaaccatatctttgattctgttacatgacacgactgcaagaagtaaataatagacgccgttgttaaagaattgctatcatatgtgcctaactagagggaatttgagcgtcagacctaatcaaatattacaaaatatctcactctgtcgccagcaatggtgtaatcagcgcagacaaatggcgtaaagatcgcggaaaaacctccccgagtggcatgatagctgcctctgtattgctgatttagtcagccttatttgacttaagggtgccctcgttagtgacaaattgctttcaaggagacagccatgccccacactttgttgaaaaacaaattgcctttggggagacggtaaagccagttgctcttcaataaggaatgtcgaggaggcaatgtaaccgcctctggtagtacacttctctaatccaaaaatcaatttgtattcaagataccgcaaaaaacttatggtttaaaccctgcaggactagtccagaaggtaattatccaagatgtagcatcaagaatccaatgtttacgggaaaaactatggaagtattatgtaagctcagcaagaagcagatcaatatgcggcacatatgcaacctatgttcaaaaatgaagaatgtacagatacaagatcctatactgccagaatacgaagaagaatacgtagaaattgaaaaagaagaaccaggcgaagaaaagaatcttgaagacgtaagcactgacgacaacaatgaaaagaagaagataaggtcggtgattgtgaaagagacatagaggacacatgtaaggtggaaaatgtaagggcggaaagtaaccttatcacaaaggaatcttatcccccactacttatccttttatatttttccgtgtcatttttgcccttgagttttcctatataaggaaccaagttcggcatttgtgaaaacaagaaaaaatttggtgtaagctattttctttgaagtactgaggatacaacttcagagaaatttgtaagtttgtaggtaccagatctggatcccaaaccatgtctccggagaggagaccagttgagattaggccagctacagcagctgatatggccgcggtttgtgatatcgttaaccattacattgagacgtctacagtgaactttaggacagagccacaaacaccacaagagtggattgatgatctagagaggttgcaagatagatacccttggttggttgctgaggttgagggtgttgtggctggtattgcttacgctgggccctggaaggctaggaacgcttacgattggacagttgagagtactgtttacgtgtcacataggcatcaaaggttgggcctaggatctacattgtacacacatttgcttaagtctatggaggcgcaaggttttaagtctgtggttgctgttataggccttccaaacgatccatctgttaggttgcatgaggctttgggatacacagcccggggtacattgcgcgcagctggatacaagcatggtggatggcatgatgttggtttttggcaaagggattttgagttgccagctcctccaaggccagttaggccagttacccaaatctgagtagttagcttaatcacctagagctcgatcggcggcaatagcttcttagcgccatcccgggttgatcctatctgtgttgaaatagttgcggtgggcaaggctctctttcagaaagacaggcggccaaaggaacccaaggtgaggtgggctatggctctcagttccttgtggaagcgcttggtctaaggtgcagaggtgttagcgggatgaagcaaaagtgtccgattgtaacaagatatgttgatcctacgtaaggatattaaagtatgtattcatcactaatataatcagtgtattccaatatgtactacgatttccaatgtctttattgtcgccgtatgtaatcggcgtcacaaaataatccccggtgactttcttttaatccaggatgaaataatatgttattataatttttgcgatttggtccgttataggaattgaagtgtgcttgaggtcggtcgccaccactcccatttcataattttacatgtatttgaaaaataaaaatttatggtattcaatttaaacacgtatacttgtaaagaatgatatcttgaaagaaatatagtttaaatatttattgataaaataacaagtcaggtattatagtccaagcaaaaacataaatttattgatgcaagtttaaattcagaaatatttcaataactgattatatcagctggtacattgccgtagatgaaagactgagtgcgatattatggtgtaatacataggaattcgtttaaacgatctgcgtctaattttcggtccaacttgcacaggaaagacgtcgaccgcggtagctcttgcccagcagactgggcttccagtcctttcgctcgatcgggtccaatgttgtcctcagctgtgaaccggaagcggacgaccaacagtggaagaactgaaaggaacgagccgtctataccttgatgatcggcctctggtgaagggtatcatcgcagccaagcaagctcatgaaaggctgatgggggaggtgtataattatgaggcccacggcgggcttattctttagggaggatctatctcgttgctcaagtgcatggcgcaaagcagttattggagtgcggattttcgttggcatattattcgccacgagttagcagacgaagagaccttcatgaacgtggccaaggccagagttaagcagatgttacgccctgctgcaggcctttctattatccaatagttggttgatctttggaaagagcctcggctgaggcccatactgaaagagatcgatggatatcgatatgccatgttgtttgctagccagaaccagatcacatccgatatgctattgcagcttgacgcagatatggaggataagttgattcatgggatcgctcaggagtagctcatccatgcacgccgacaagaacagaaattccgtcgagttaacgcagccgcttacgacggattcgaaggtcatccattcggaatgtattagtttgcaccagctccgcgtcacacctgtcttcatttgaataagatgttagcaattgtttttagctttgtcttgttgtggcagggcggcaagtgcttcagacatcattctgttttcaaattttatgctggagaacagcttcttaattcctttggaaataatagactgcgtcttaaaattcagatgtctggatatagatatgattgtaaaataacctatttaagtgtcatttagaacataagttttatgaatgttcttccattttcgtcatcgaacgaataagagtaaatacaccttttttaacattacaaataagttcttatacgttgtttatacaccgggaatcatttccattattttcgcgcaaaagtcacggatattcgtgaaagcgacataaactgcgaaatttgcggggagtgtcttgagtttgcctcgaggctagcgcatgcacatagacacacacatcatctcattgatgcttggtaataattgtcattagattgtttttatgcatagatgcactcgaaatcagccaattttagacaagtatcaaacggatgtgacttcagtacattaaaaacgtccgcaatgtgttattaagttgtctaagcgtcaatttgatttacaattgaatatatcctgccccagccagccaacagctcgatttacaattgaatatatcctgccggccggcccacgcgtgtcgaggaattctgatctggcccccatttggacgtgaatgtagacacgtcgaaataaagatttccgaattagaataatttgtttattgctttcgcctataaatacgacggatcgtaatttgtcgttttatcaaaatgtactttcattttataataacgctgcggacatctacatttttgaattgaaaaaaaattggtaattactctttctttttctccatattgaccatcatactcattgctgatccatgtagatttcccggacatgaagccatttacaattgaatatatcctgccgccgctgccgctttgcacccggtggagcttgcatgttggtttctacgcagaactgagccggttaggcagataatttccattgagaactgagccatgtgcaccttccccccaacacggtgagcgacggggcaacggagtgatccacatgggacttttaaacatcatccgtcggatggcgttgcgagagaagcagtcgatccgtgagatcagccgacgcaccgggcaggcgcgcaacacgatcgcaaagtatttgaacgcaggtacaatcgagccgacgttcacgcggaacgaccaagcaagcttggctgccatttttggggtgaggccgttcgcggccgaggggcgcagcccctggggggatgggaggcccgcgttagcgggccgggagggttcgagaagggggggcaccccccttcggcgtgcgcggtcacgcgcacagggcgcagccctggttaaaaacaaggtttataaatattggtttaaaagcaggttaaaagacaggttagcggtggccgaaaaacgggcggaaacccttgcaaatgctggattttctgcctgtggacagcccctcaaatgtcaataggtgcgcccctcatctgtcagcactctgcccctcaagtgtcaaggatcgcgcccctcatctgtcagtagtcgcgcccctcaagtgtcaataccgcagggcacttatccccaggcttgtccacatcatctgtgggaaactcgcgtaaaatcaggcgttttcgccgatttgcgaggctggccagctccacgtcgccggccgaaatcgagcctgcccctcatctgtcaacgccgcgccgggtgagtcggcccctcaagtgtcaacgtccgcccctcatctgtcagtgagggccaagttttccgcgaggtatccacaacgccggcggccgcggtgtctcgcacacggcttcgacggcgtttctggcgcgtttgcagggccatagacggccgccagcccagcggcgagggcaaccagcccggtgagcgtcggaaagggtcgacggatcttttccgctgcataaccctgcttcggggtcattatagcgattttttcggtatatccatcctttttcgcacgatatacaggattttgccaaagggttcgtgtagactttccttggtgtatccaacggcgtcagccgggcaggataggtgaagtaggcccacccgcgagcgggtgttccttcttcactgtcccttattcgcacctggcggtgctcaacgggaatcctgctctgcgaggctggccggctaccgccggcgtaacagatgagggcaagcggatggctgatgaaaccaagccaaccaggaagggcagcccacctatcaaggtgtactgccttccagacgaacgaagagcgattgaggaaaaggcggcggcggccggcatgagcctgtcggcctacctgctggccgtcggccagggctacaaaatcacgggcgtcgtggactatgagcacgtccgcgagctggcccgcatcaatggcgacctgggccgcctgggcggcctgctgaaactctggctcaccgacgacccgcgcacggcgcggttcggtgatgccacgatcctcgccctgctggcgaagatcgaagagaagcaggacgagcttggcaaggtcatgatgggcgtggtccgcccgagggcagagccatgacttttttagccgctaaaacggccggggggtgcgcgtgattgccaagcacgtccccatgcgctccatcaagaagagcgacttcgcggagctggtattcgtgcagggcaagattcggaataccaagtacgagaaggacggccagacggtctacgggaccgacttcattgccgataaggtggattatctggacaccaaggcaccaggcgggtcaaatcaggaataagggcacattgccccggcgtgagtcggggcaatcccgcaaggagggtgaatgaatcggacgtttgaccggaaggcatacaggcaagaactgatcgacgcggggttttccgccgaggatgccgaaaccatcgcaagccgcaccgtcatgcgtgcgccccgcgaaaccttccagtccgtcggctcgatggtccagcaagctacggccaagatcgagcgcgacagcgtgcaactggctccccctgccctgcccgcgccatcggccgccgtggagcgttcgcgtcgtctcgaacaggaggcggcaggtttggcgaagtcgatgaccatcgacacgcgaggaactatgacgaccaagaagcgaaaaaccgccggcgaggacctggcaaaacaggtcagcgaggccaagcaggccgcgttgctgaaacacacgaagcagcagatcaaggaaatgcagctttccttgttcgatattgcgccgtggccggacacgatgcgagcgatgccaaacgacacggcccgctctgccctgttcaccacgcgcaacaagaaaatcccgcgcgaggcgctgcaaaacaaggtcattttccacgtcaacaaggacgtgaagatcacctacaccggcgtcgagctgcgggccgacgatgacgaactggtgtggcagcaggtgttggagtacgcgaagcgcacccctatcggcgagccgatcaccttcacgttctacgagctttgccaggacctgggctggtcgatcaatggccggtattacacgaaggccgaggaatgcctgtcgcgcctacaggcgacggcgatgggcttcacgtccgaccgcgttgggcacctggaatcggtgtcgctgctgcaccgcttccgcgtcctggaccgtggcaagaaaacgtcccgttgccaggtcctgatcgacgaggaaatcgtcgtgctgtttgctggcgaccactacacgaaattcatatgggagaagtaccgcaagctgtcgccgacggcccgacggatgttcgactatttcagctcgcaccgggagccgtacccgctcaagctggaaaccttccgcctcatgtgcggatcggattccacccgcgtgaagaagtggcgcgagcaggtcggcgaagcctgcgaagagttgcgaggcagcggcctggtggaacacgcctgggtcaatgatgacctggtgcattgcaaacgctagggccttgtggggtcagttccggctgggggttcagcagccagcgctttactggcatttcaggaacaagcgggcactgctcgacgcacttgcttcgctcagtatcgctcgggacgcacggcgcgctctacgaactgccgataaacagaggattaaaattgacaattgtgattaaggctcagattcgacggcttggagcggccgacgtgcaggatttccgcgagatccgattgtcggccctgaagaaagctccagagatgttcgggtccgtttacgagcacgaggagaaaaagcccatggaggcgttcgctgaacggttgcgagatgccgtggcattcggcgcctacatcgacggcgagatcattgggctgtcggtcttcaaacaggaggacggccccaaggacgctcacaaggcgcatctgtccggcgttttcgtggagcccgaacagcgaggccgaggggtcgccggtatgctgctgcgggcgttgccggcgggtttattgctcgtgatgatcgtccgacagattccaacgggaatctggtggatgcgcatcttcatcctcggcgcacttaatatttcgctattctggagcttgttgtttatttcggtctaccgcctgccgggcggggtcgcggcgacggtaggcgctgtgcagccgctgatggtcgtgttcatctctgccgctctgctaggtagcccgatacgattgatggcggtcctgggggctatttgcggaactgcgggcgtggcgctgttggtgttgacaccaaacgcagcgctagatcctgtcggcgtcgcagcgggcctggcgggggcggtttccatggcgttcggaaccgtgctgacccgcaagtggcaacctcccgtgcctctgctcacctttaccgcctggcaactggcggccggaggacttctgctcgttccagtagctttagtgtttgatccgccaatcccgatgcctacaggaaccaatgttctcggcctggcgtggctcggcctgatcggagcgggtttaacctacttcctttggttccgggggatctcgcgactcgaacctacagttgtttccttactgggctttctcagcccccgagcgcttagtgggaatttgtaccccttatcgaaccgggagcacaggatgacgcctaacaattcattcaagccgacaccgcttcgcggcgcggcttaattcaggagttaaacatcatgagggaagcggtgatcgccgaagtatcgactcaactatcagaggtagttggcgtcatcgagcgccatctcgaaccgacgttgctggccgtacatttgtacggctccgcagtggatggcggcctgaagccacacagtgatattgatttgctggttacggtgaccgtaaggcttgatgaaacaacgcggcgagctttgatcaacgaccttttggaaacttcggcttcccctggagagagcgagattctccgcgctgtagaagtcaccattgttgtgcacgacgacatcattccgtggcgttatccagctaagcgcgaactgcaatttggagaatggcagcgcaatgacattcttgcaggtatcttcgagccagccacgatcgacattgatctggctatcttgctgacaaaagcaagagaacatagcgttgccttggtaggtccagcggcggaggaactctttgatccggttcctgaacaggatctatttgaggcgctaaatgaaaccttaacgctatggaactcgccgcccgactgggctggcgatgagcgaaatgtagtgcttacgttgtcccgcatttggtacagcgcagtaaccggcaaaatcgcgccgaaggatgtcgctgccgactgggcaatggagcgcctgccggcccagtatcagcccgtcatacttgaagctaggcaggcttatcttggacaagaagatcgcttggcctcgcgcgcagatcagttggaagaatttgttcactacgtgaaaggcgagatcaccaaggtagtcggcaaataatgtctaacaattcgttcaagccgacgccgcttcgcggcgcggcttaactcaagcgttagagagctggggaagactatgcgcgatctgttgaaggtggttctaagcctcgtcttgcgatggcatttcgatccattcccattccgcgctcaagatggcttcccctcggcagttcatcagggctaaatcaatctagccgacttgtccggtgaaatgggctgcactccaacagaaacaatcaaacaaacatacacagcgacttattcacacgagctcaaattacaacggtatatatcctgccagtcagcatcatcacaccaaaagttaggcccgaatagtttgaaattagaaagctcgcaattgaggtctacaggccaaattcgctcttagccgtacaatattactcaccggatcctaaccggtttaattaaggcgcgccatgcccgggcaagcggccgcacaagtttgtacaaaaaagcaggcttctagacctaggtggagtcatcacgcagactatctcagcatgtgcgtagcacgcggccgcctcccagtatcattatagtgaaagttttggctctctcgccggtggttttttacctctatttaaaggggttttccacctaaaaattctggtatcattctcactttacttgttactttaatttctcataatctttggttgaaattatcacgcttccgcacacgatatccctacaaatttattatttgttaaacattttcaaaccgcataaaattttatgaagtcccgtctatctttaatgtagtctaacattttcatattgaaatatataatttacttaattttagcgttggtagaaagcataatgatttattcttattcttcttcatataaatgtttaatatacaatataaacaaattctttaccttaagaaggatttcccattttatattttaaaaatatatttatcaaatatttttcaaccacgtaaatctcataataataagttgtttcaaaagtaataaaatttaactccataatttttttattcgactgatcttaaagcaacacccagtgacacaactagccatttttttctttgaataaaaaaatccaattatcattgtattttttttatacaatgaaaatttcaccaaacaatgatttgtggtatttctgaagcaagtcatgttatgcaaaattctataattcccatttgacactacggaagtaactgaagatctgcttttacatgcgagacacatcttctaaagtaattttaataatagttactatattcaagatttcatatatcaaatactcaatattacttctaaaaaattaattagatataattaaaatattacttttttaattttaagtttaattgttgaatttgtgactattgatttattattctactatgtttaaattgttttatagatagtttaaagtaaatataagtaatgtagtagagtgttagagtgttaccctaaaccataaactataagatttatggtggactaattttcatatatttcttattgcttttaccttttcttggtatgtaagtccgtaactggaattactgtgggttgccatgacactctgtggtcttttggttcatgcatggatcttgcgcaagaaaaagacaaagaacaaagaaaaaagacaaaacagagagacaaaacgcaatcacacaaccaactcaaattagtcactggctgatcaagatcgccgcgtccatgtatgtctaaatgccatgcaaagcaacacgtgcttaacatgcactttaaatggctcacccatctcaacccacacacaaacacattgcctttttcttcatcatcaccacaaccacctgtatatattcattctcttccgccacctcaatttcttcacttcaacacacgtcaacctgcatatgcgtgtcatcccatgcccaaatctccatgcatgttccaaccaccttctctcttatataatacctataaatacctctaatatcactcacttctttcatcatccatccatccagagtactactactctactactataataccccaacccaactcatattcaatactactctaggatccacaaccaaaaatggcagcgaggctgcaagagcagaaaggaggtgagatggacacgaggattgcgatcataggcatgagcgccatacttccttgtggaaccacggtgagagagtcatgggagaccataagggctggcattgattgcctgtctgatcttcctgaggatcgtgttgatgtgactgcgtactttgacccagtcaagaccacaaaggacaaaatctactgcaagagaggaggtttcattcctgagtatgactttgatgcgcgtgagtttggtctcaacatgttccagatggaagattctgatgcgaatcagaccatctcacttctcaaggtcaaagaagcacttcaagatgctgggattgatgcacttggaaaggagaagaaaaacataggatgcgtgcttggcattggaggtggacagaagagttcacatgagttctacagcagactcaactatgtggttgtggagaaagtcttgagaaagatggggatgccagaggaagatgtcaaagtggctgtggagaagtacaaagcgaacttcccagaatggagacttgactctttccctggattccttgggaatgtcactgctggcagatgcaccaacacattcaacttggatggcatgaactgcgttgtggatgctgcatgtgcaagctccttgatagcagtcaaggttgcgattgatgaactgctctatggtgactgcgacatgatggtcactggtgcaacctgcacagacaactccattgggatgtacatggctttctcaaagacacctgtgttcagcacggacccaagtgtgagagcgtatgatgagaaaacgaaagggatgctcattggtgagggatcagccatgttggtgctcaaacgttatgcagatgcagtgagggatggtgatgagattcatgctgtgattcgtggttgtgcaagctcaagtgatggcaaagcagctggcatctacactcccacaatcagtggtcaagaggaagccttgagacgtgcatacaatcgtgcctgcgttgaccctgccactgtcactttggttgagggtcatgggactggcactccagttggagataggattgagttgactgcgttgaggaacttgtttgacaaagcgtatggtgaagggaacacagagaaagttgcagttggaagtatcaagtccagtattggtcatttgaaggctgttgctggtcttgctggaatgatcaaggtcatcatggctctcaaacacaagactttgcctggaacgatcaatgtggacaatccacccaatctctatgacaacactcccatcaatgagtcatccctctacatcaacacgatgaacagaccctggttccctccacctggtgttccgagacgtgctggaatatccagctttggctttggaggtgccaactaccatgcagtgttggaagaggctgaaccagagcacacgacagcgtacagactcaacaaacgtccacaaccggtgttgatgatggctgcaactcctgctgcgttgcagagcctttgtgaagctcagctgaaagagtttgaagctgcgatcaaggagaatgagacagtcaagaatactgcctacatcaagtgtgtcaagtttggagaacagttcaagttccctgggagcatacctgcgaccaatgcgagactgggattcttggtcaaagatgcggaggatgcgtgctccacgcttcgtgctatatgtgctcagtttgccaaagatgtgaccaaagaagcgtggaggcttccgagagaaggagtttctttccgtgccaaaggcattgccaccaatggtgctgttgctgcactcttctctggacaaggtgctcagtacacacacatgttcagtgaagttgcgatgaactggcctcagttcagacagtccattgctgcaatggacgctgcacagtccaaggttgctggaagtgacaaagactttgaaagagtctctcaagtcctgtacccaaggaaaccgtacgaacgtgagccagaacaagatcacaagaaaatctcactcacagcatacagccagccgtcaaccctggcatgtgctcttggtgcctttgagattttcaaggaagctggattcactccagactttgcagctggacacagcttgggtgagtttgctgcgctctatgcagctggttgtgttgacagagatgagttgtttgaacttgtttgcagaagggcaaggatcatgggaggcaaagatgcacctgccacacccaaaggttgcatggcagctgtcataggacccaacgcagagaacatcaaggttcaagctgccaacgtctggcttggaaactcaaactctccgtctcagactgtcattactgggtctgttgaagggattcaagctgaaagtgccagattgcagaaggaagggttcagagttgtgcctcttgcttgtgagtctgccttccattctccacagatggaaaatgccagctcagctttcaaagatgtcatatccaaggtttccttccgtacacccaaagcagaaacaaagctcttcagcaatgtttctggagagacctatccgacggatgccagagagatgctcactcaacacatgacctcatctgtgaagttcctgacccaagtgaggaacatgcaccaagctggtgcgagaatctttgttgagtttggaccgaaacaagttctcagcaaacttgtttctgaaaccctcaaagatgacccgtctgttgtcacagtgtctgtgaacccagcttctggcacggactctgacatacagttgagggatgctgcagttcagctggttgtggctggtgtcaatcttcaagggtttgacaagtgggatgctcctgatgccacgaggatgcaagccatcaagaaaaagagaaccacactcagactttcagctgccacctatgtcagtgacaagaccaagaaagtgagggatgctgccatgaacgacggaagatgtgtcacatacctcaagggtgctgcaccactcatcaaggctcctgaacctgtggttgacgaagctgccaagagggaggctgaaaggcttcagaaggagcttcaagacgctcagaggcagcttgacgacgccaaacgtgcagctgcagaagccaactccaaacttgctgctgccaaggaggaagccaagactgctgcagcttcagccaagcctgcagttgacactgctgttgtggagaaacatcgtgccatcctcaagtccatgctggctgagctggatggttatggaagtgttgatgcttcttcccttcagcaacagcaacagcaacagactgctccggcgcctgttaaagccgctgcccctgccgctcccgttgcaagtgctcctgctcccgccgtgtccaacgagttgcttgagaaagctgagacagttgtgatggaggttctcgctgccaagactggatacgaaacagacatgattgaggcggacatggagcttgagactgagttgggaattgacagcatcaagagggttgaaattctttctgaagtccaagctatgcttaacgttgaggcgaaagatgttgatgctctctctaggacgagaacagtgggtgaagttgtcaacgctatgaaggcagaaatcgctggttcttccgctccggcgccggcagctgccgcacctgcaccggctaaagcggctccagctgcagctgcaccagctgtttctaatgagctgctcgaaaaggcagaaactgttgtgatggaagtccttgctgccaaaactggctacgaaactgacatgatagaatcagacatggagcttgagacggagcttggaattgattccatcaagcgtgtggaaatcctcagtgaagtccaagccatgctcaatgtggaagctaaggatgtggatgctctctcaaggaccagaactgtcggtgaggttgtcaatgccatgaaggctgagatagctggaggctccgctcctgcgccggccgctgccgctcctggtcccgctgccgcggctccagctccagctgcagccgctccggccgtctcaaacgaactccttgaaaaagctgagaccgtcgtgatggaggtcttggcagctaaaaccggctatgagactgacatgattgagtctgacatggaattggagacagaacttgggatagacagcatcaaacgtgttgaaatcctcagtgaggtccaagctatgctgaacgtggaagcgaaggatgttgatgctctgtccagaacgaggaccgttggtgaggttgtggatgccatgaaggctgaaattgctggagggtctgcgcccgcgccagctgcagccgctcctgcacccgcagccgcggcacctgctccagctgcacctgcacctgccgtttcttcagaactcttggagaaggctgagacggttgtgatggaggttttggctgcaaagactggctatgagaccgacatgattgaatctgatatggaattggagacagagcttgggatcgattccatcaaaagagtggagatcctgagtgaagtccaagccatgctcaatgttgaagctaaggatgttgatgcactttcaagaacaaggacagtgggtgaggttgtggatgccatgaaggcggagattgctggagggagcgcgcctgcgccagctgccgcggcacctgcaccggcagccgcagctccagctccagctgcaccagcaccggccgcgcccgcgccagctgtttcatccgaactcctggaaaaggccgagacggttgtgatggaggtgctcgcagctaagactggttacgagaccgacatgattgaaagtgacatggagcttgaaaccgagttgggaatagatagcatcaaacgtgttgaaatcttgtctgaggtccaagctatgttgaacgtggaggcaaaagatgtcgatgcgctttcaagaaccagaacagtcggtgaggtcgtggacgccatgaaggctgaaattgccggaagctctgctagtgcgccagctgcagccgcacctgcacctgctgccgcggcacctgctccagctgcagccgctcctgccgtcagcaatgagttgctggagaaagccgaaacagttgtgatggaagtccttgctgcaaaaactggttacgaaacggacatgattgagtcagacatggaattggagaccgaacttggaatagattccatcaagagagtggagatcctctctgaggtgcaagccatgctcaacgttgaggctaaagatgttgatgcactcagtaggacaagaactgtgggggaagttgtcgatgcgatgaaggctgagattgctggaggctctgctcctgcgccggcagctgccgcacctgcacccgcagccgcggcaccagctgtcagcaacgaattgcttgagaaggctgaaacagttgtcatggaagtgctggctgcaaaaaccggctatgagactgacatgattgagtctgacatggaacttgagacggaattgggcattgacagcatcaagcgtgttgagatcctcagtgaagtccaagcaatgctcaatgtggaggctaaggatgtggatgccctctcaaggaccagaacagttggtgaggtcgttgatgcgatgaaggcggagatcgctggaagttccgcgcctgcgccagctgcagccgctcctgcacccgcagccgcggcaccggctccagctgcagccgcaccggccgtctcctcagaactcctggaaaaggctgagacagttgtgatggaagtccttgctgcgaaaactggctatgagaccgacatgattgaatctgacatggaactggagaccgagcttggaattgactccatcaaacgtgttgaaatcctctctgaggttcaagcgatgttgaatgtggaggccaaagatgttgatgctctttccagaacaaggacggtgggagaggtggttgatgccatgaaggctgagatagctgggggttctgctcctgcgccagctgcagccgctcctgctcccgctgccgcggcaccagctgtcagcaacgaactccttgaaaaagctgaaactgttgtgatggaggttttggctgcaaagactggatacgagactgacatgatagagtcagacatggagttggaaacagagcttgggattgatagcatcaagcgtgtggaaatcctttctgaggttcaagccatgctgaacgttgaggccaaagatgtcgatgctttgtcaaggaccagaacggttggagaagtggtcgatgccatgaaggctgagatagctggtggatcagcccctgctccggctgcagccgctcctgcaagtgccggtgctgcaccagctgtgaagattgattcagttcatggtgctgactgtgacgatttgtcactgatgcacgcaaaggtggttgacatcagaaggccagatgaactgattctggaaagaccggagaaccgtccagttcttgtcgttgacgatggctcagagttgacacttgctcttgtgagggtgttgggagcctgtgcagttgtcttgacctttgagggattgcagttggctcagagagctggtgcagctgccattcgtcatgttctggctaaggacctttcagcagaatcagctgagaaggccatcaaagaggctgagcaaagatttggagcgttgggaggcttcataagccagcaagcagaaaggtttgaaccagctgagatactgggtttcacactcatgtgtgcgaagtttgccaaagcctctctctgcactgctgtggctggaggtcgtcctgccttcatcggtgtggctaggcttgacggcagacttggattcacctctcaaggcacttctgacgcactcaagagagcacagcgtggagcgatctttggactctgcaagacaatagggttggagtggtcagaatctgatgtgttcagccgtggtgtggacattgctcaagggatgcacccagaagatgctgcagttgccatagttagggagatggcgtgtgctgacatcagaatcagagaggttgggattggagcaaaccagcaaagatgcacaatcagagctgccaagttggagactgggaaccctcagagacagatagcgaaagacgatgtgcttctggtttctggaggtgctcgtgggatcacacctctttgcatccgtgagatcacgcgtcagattgctggaggcaagtacattctgttgggtcgtagcaaagtttctgcgtctgaaccagcatggtgtgctggcatcactgatgagaaggctgtgcagaaagctgccacccaagagttgaagagggccttcagtgctggtgaaggacccaaacccactccaagggctgtcacgaaacttgtgggatctgttcttggtgctcgtgaagtgagaagctccattgctgccattgaagctctgggtggcaaagcgatctacagctcttgtgatgtgaactctgctgcagatgttgccaaagcagttagggatgcagagtcccagcttggtgccagagttagtggaatcgttcacgcttctggtgtgctccgtgatcgtctcatagagaagaaactccctgacgagtttgatgctgtctttgggaccaaagtcactgggttggagaatcttctggctgcagttgatcgtgccaacctcaaacacatggttctcttcagctcccttgctggtttccacggcaatgttggtcagtctgactatgcgatggcaaacgaagctctcaacaagatgggtttggaacttgcgaaggatgtcagtgtcaagtccatctgctttggtccctgggatggtgggatggtgacacctcaactcaagaaacagtttcaagaaatgggagttcagatcattcctcgtgaaggaggtgctgatacagttgcgaggattgtgttgggatcaagtcctgctgagatccttgttggaaactggaggacaccatccaagaaagttggaagtgacacgatcaccctgcatagaaagatcagtgccaagtccaatcccttcttggaggatcatgtcatacaaggcagaagggtgttgccaatgacccttgctattgggagccttgctgagacctgccttggactcttccctggctactctctctgggccatagatgacgcacagctcttcaaaggtgtcactgttgatggagacgtcaactgtgaagtgaccctcacaccgtccactgctccgagtgggagggtgaatgtccaagcgacgctcaagacgttctcaagtggaaaacttgttccagcctacagagctgtcatagtgttgtccaaccaaggtgctccacctgccaatgcaaccatgcagcctccgagccttgatgcagatcctgctttgcaagggtcagtctatgatggcaagactctctttcatggtcctgcgttcagaggcattgatgacgttctcagctgcaccaagagccagcttgttgccaagtgttctgctgttcctggatcagatgcagccagaggagagtttgcaactgacactgatgcacatgatccctttgtcaatgatcttgcctttcaagcaatgttggtctgggtgaggagaacgctgggacaagctgcactcccgaactccattcagaggatagtccaacacagaccggtcccacaagacaaacccttctacatcaccctcagatccaatcagagtggtggacatagccagcacaaacatgcacttcagttccacaacgaacaaggtgatctcttcattgatgttcaagcctctgtcattgcgacagactcacttgcgttctgagtagttagcttaatcacttaggtcaccagtatgaactaaaatgcatgtaggtgtaagagctcatggagagcatggaatattgtatccgaccatgtaacagtataataactgagctccatctcacttcttctatgaataaacaaaggatgttatgatatattaacactctatctatgcaccttattgttctatgataaatttcctcttattattataaatcatctgaatcgtgacggcttatggaatgcttcaaatagtacaaaaacaaatgtgtactataagactttctaaacaattctaactttagcattgtgaacgagacataagtgttaagaagacataacaattataatggaagaagtttgtctccatttatatattatatattacccacttatgtattatattaggatgttaaggagacataacaattataaagagagaagtttgtatccatttatatattatatactacccatttatatattatacttatccacttatttaatgtctttataaggtttgatccatgatatttctaatattttagttgatatgtatatgaaaaggtactatttgaactctcttactctgtataaaggttggatcatccttaaagtgggtctatttaattttattgcttcttacagataaaaaaaaaattatgagttggtttgataaaatattgaaggatttaaaataataataaataataaataacatataatatatgtatataaatttattataatataacatttatctataaaaaagtaaatattgtcataaatctatacaatcgtttagccttgctggaacgaatctcaattatttaaacgagagtaaacatatttgactttttggttatttaacaaattattatttaacactatatgaaattttttttttttatcagcaaagaataaaattaaattaagaaggacaatggtgtcccaatccttatacaaccaacttccacaagaaagtcaagtcagagacaacaaaaaaacaagcaaaggaaattttttaatttgagttgtcttgtttgctgcataatttatgcagtaaaacactacacataacccttttagcagtagagcaatggttgaccgtgtgcttagcttcttttattttatttttttatcagcaaagaataaataaaataaaatgagacacttcagggatgtttcaacccttatacaaaaccccaaaaacaagtttcctagcaccctaccaacgaattcgcggccgcttaattaagatgagtgatactcaggactcaggactcactctgctgatcactagtgctagcctcgaggtcgacacaactttgtatacaaaagttgtctagacctaggctcagcaactcatccagtcaagttcgagtcagtgagttgggcggccgcagcttatagtaaagatttttttgttaataaaatgaaagttaatatttatggatttatttgaacatatttacaagtttttgttaataaatttatttacagaagtgttaaatttgaaaatgtgttaaatgagagttaatatttatggatataatattactttatttaaaaataaaatgaatttatattaaaatatgatttggtaaaagatattataaagaggaacttggatgagaaagacgacgatgggcaaaagttgcatggcacaccgcttttgttcagtaacatctgcactgtggcgcctttttcacactcaccatgcatgctgccacgtcagctttcacactatgacaccactggccatacacgttgccacctcagctttctcctcttctcactatgacacgactggccatgcatgcatgcatgctgccacctcagctcccgcctcttcacccgtgtctttctctcatgtcgcagtgctgcgtgccaacctcttctctctataaatagagagaagagaatgatggttaaactcaaaccaaaacaagaaaacatacacaaatagcaaaacggatccacaaccaaaaatggctgcaaggaacgtgagtgcggctcatgagatgcatgacgagaagaggatagctgttgtgggcatggctgttcagtatgctggatgcaaaacgaaagacgagttctgggaagttctcatgaatggaaaagttgagagcaaagtgatcagcgacaaacgtcttggttcaaattaccgtgctgaacactacaaagctgaaaggagcaagtatgctgacaccttctgcaatgagacatatggaactcttgatgagaacgaaatagacaatgagcatgaactccttttgaaccttgccaaacaagccttggctgaaacatctgtcaaagattcaacaagatgtggcatagtttctggatgcctcagcttcccgatggacaacctccaaggtgaactcttgaatgtgtaccagaaccatgttgagaagaaacttggtgccagagttttcaaagatgcctctcactggtcagaaagagaacagtccaacaaaccagaggctggtgacagaagaatcttcatggaccctgcttcctttgttgctgaggaactcaatcttggcgctctccactactctgttgatgctgcctgtgccactgcgctctatgtgctcagactggcgcaagatcacttggtctctggtgcagctgatgtgatgctttgtggtgcaacatgcctgccggagccgtttttcatactctctgggttctcaaccttccaagccatgcctgttggaacgggtcagaatgtgtccatgccgctgcacaaagattctcaaggattgacccctggtgaaggaggttccatcatggtcctcaaacgtttggatgacgcaatcagagatggagatcacatctatggaacacttttgggagccaatgtcagcaacagtggcactggtctgccacttaaaccccttttgccgtcagagaaaaagtgcctcatggacacctacacacgtatcaatgtgcatccccacaagattcagtatgttgaatgccatgcaactgggactccacaaggtgatcgtgtggaaattgatgctgtgaaggcttgctttgaaggcaaagtcccacgttttggaaccacaaaagggaactttggacacacattggtggcagctgggtttgctggcatgtgcaaagtgcttctctccatgaagcacgggatcattccacccactccgggaatagatgacgaaacgaagatggaccctctggttgtctctggtgaggccattccctggccagaaacgaatggagaaccgaagcgtgctggtctctcagcgtttggatttggtgggaccaatgctcatgctgtctttgaggaacatgacccaagcaatgctgcatgcactggccatgactccatttctgctctctctgcacgttgtggtggtgagtcaaacatgagaatagcaatcactgggatggatgccacttttggtgctttgaaaggattggatgcttttgaaagggccatctacactggtgctcatggtgctataccactcccagaaaagagatggagattcctggggaaagacaaggacttccttgatctttgtggagtcaaagcaacaccgcatggctgttacattgaagatgttgaagttgatttccagaggctgaggactccaatgactcctgaagatatgctcttgcctcaacagcttctggctgtcaccacaattgatagggccatattggactctggcatgaagaaaggtggaaatgtggctgtctttgtggggttggggaccgatcttgaactctaccgtcaccgtgcaagggttgctctcaaggagagagtgaggcctgaagccagcaagaaactcaatgacatgatgcagtacatcaatgattgtgggacaagcacttcttacaccagctacataggcaacttggttgcaacaagggtcagttcacaatggggcttcacgggaccttccttcacaatcacagaaggcaacaattctgtgtacagatgtgctgaacttggcaaatacctcttggaaacgggagaggttgatggggttgtggttgcgggtgttgatctctgtgggagtgctgagaacctttacgtcaagtcaaggcgtttcaaggtgtctacatctgacaccccgagagccagctttgatgcagctgctgatggttactttgttggagagggctgtggtgcatttgtgctcaagcgtgagacaagctgcaccaaggatgacagaatctatgcttgcatggatgccatagttcctggaaatgttccatctgcatgtttgagagaggcattggatcaagccagagtcaagcctggagacatcgagatgttggagctttctgctgattcagcgaggcatttgaaggacccgtctgttctcccaaaggaactcactgctgaggaagagattggcggacttcagacgattcttcgtgacgatgacaagctcccaaggaatgttgcaactggaagtgtcaaggccactgttggtgacactggttatgcttctggtgctgccagtttgattaaggctgcgctttgcatctacaaccgttacctgcccagcaatggagatgactgggatgaacctgcacctgaagcaccctgggacagcacactctttgcgtgccagacctcaagagcttggttgaagaaccctggtgagagacgttatgcggctgtttccggagtcagtgaaaccagaagttgctacagtgtgctgctttctgaagcagagggacactacgagagagagaacagaatcagtttggatgaggaagcacccaagctcattgtgttgagagcagactcccatgaagagattcttggaagattggacaagataagggaaaggttcttgcagcccacgggtgctgcacccagagagtctgaattgaaggcgcaagcccgtaggatctttcttgaactccttggtgagacccttgcccaagatgcagcttcatctggaagtcagaagccccttgctctcagcttggtctccactccatccaagctccagagagaggtggaacttgcggcaaaaggcattccgagatgtctcaagatgagacgtgattggagttcccctgctggaagcagatatgcgcctgagcctttggccagtgacagagttgccttcatgtatggagaaggaaggagcccttactatggcatcacacaagacattcataggatttggcctgaacttcatgaggtcatcaatgagaaaacaaaccgtctctgggctgaaggtgacagatgggtcatgccaagggccagcttcaagagtgagcttgagtcacaacagcaagagtttgacagaaacatgattgaaatgttccgtcttggaatcctcacctcaattgccttcacaaacctggcgagagatgttctcaacatcacgcccaaagcagcctttggactcagtttgggagagatttccatgatctttgctttctccaagaaaaacggtttgataagcgatcagttgacaaaggatttgagagagtcagatgtctggaacaaagctctggctgttgagttcaatgcgctcagagaagcctggggcattccacagtctgtcccaaaagatgagttctggcaaggttacatagtgaggggaacgaaacaagacatagaagcagccatagcaccagactcaaagtatgtgaggttgaccatcatcaatgatgccaacactgctctcatcagtggaaagcctgatgcatgcaaagctgcgattgctcgtcttggtggcaacatccctgcgcttccagtcactcaaggcatgtgtgggcattgcccagaggtgggaccttacaccaaggacatcgcaaagatccacgccaaccttgagttccctgtggttgatggtcttgatctctggactaccataaaccagaagaggcttgtgccaagagccacgggtgccaaagatgaatgggctccttcatcctttggggagtatgctggacagctctatgagaaacaagccaacttccctcagatagttgaaaccatctacaagcagaactatgatgtgtttgttgaagttgggccaaacaatcacagaagcacagcagtgagaaccacgcttggaccacagagaaaccaccttgctggtgccatagacaagcagaacgaggatgcttggacgacaatagtcaagctcgtggcttcattgaaggctcaccttgttcctggagtgaccatcagtccgctctaccactccaagctcgttgcagaggctgaggcttgttatgctgcgctctgtaaaggtgagaaacccaagaaaaacaagtttgtgagaaagattcagttgaatggcagattcaacagcaaggcagaccccatctcctcagcagaccttgcatccttcccacctgcggaccctgcgattgaagctgccatctcttcaaggatcatgaagcctgtggctccgaaattctatgcgcgtctcaacattgatgagcaagatgagaccagagatccgatcttgaacaaggacaatgcgccttccagctccagctcttccagcagttcctcttccagcagttcatctccgtctcctgctccttcagctccagttcagaagaaagctgccccagctgcggagacaaaagctgttgccagtgctgatgcacttcgtagtgccctgcttgatcttgactccatgcttgcgctcagctctgcaagtgcttctggcaaccttgttgagactgcgccatctgatgccagtgtcattgtccctccgtgcaacattgctgatcttggcagcagagctttcatgaaaacttatggtgtttctgcgcctctgtacaccggtgcaatggccaagggaattgcctctgcggacttggtgatcgcagctggaaggcaaggaatccttgcgtcatttggtgctggaggccttccaatgcaagttgtgcgtgagtccattgaaaagattcaagctgccctgcccaatggaccatatgctgtcaacctcatccattctccttttgacagcaaccttgagaagggaaatgttgatctcttcttggaaaagggtgtcacttttgttgaggcttcagccttcatgacgttgacaccgcaagttgtcagatacagagcggctgggttgacgaggaatgcagatgggtcagtcaacataaggaacagaatcattgggaaagtctccagaactgagctggctgaaatgttcatgcgtcctgcacctgagcatcttttgcagaagctcattgcttctggggagatcaatcaagaacaagctgagttggccagacgtgttcctgtggctgatgacattgcggttgaagctgattctggtggacacactgacaaccgtccaatccatgtcattctgcctctgattatcaacctgagggataggcttcacagagagtgtggatacccagcaaacctgagggttcgtgttggtgctgggggtggcattgggtgtccccaagctgcgctggcaactttcaacatgggtgcctctttcattgtcactggaacagtgaaccaagttgccaaacaatctgggacgtgtgacaatgtgaggaaacagcttgcgaaagcaacttactcagatgtttgcatggcaccggcagctgacatgtttgaggaaggtgtgaaacttcaagttttgaagaaaggaacaatgttcccttcaagagccaacaaactctatgagttgttctgcaagtatgattcttttgagtccatgcctccagcagagcttgcgagggttgagaaaagaatcttcagtcgtgcattggaagaggtctgggatgagaccaagaacttctacatcaaccgtctccacaacccagagaagatacagagggctgagagggaccccaaactgaagatgtcactgtgtttcagatggtatctgtccctggcttcaaggtgggccaacactggagcttctgacagagtcatggactaccaagtttggtgtggtcctgccattggttcattcaatgatttcatcaaaggaacttaccttgatccggcagtggcaaatgagtacccgtgtgttgtgcagatcaacaaacagattcttagaggagcgtgcttcttgaggcgtcttgaaatactgagaaatgcaaggctttcagatggtgcagctgcacttgtggcgagcattgatgacacatatgtccctgctgagaagctgtgagtagttagcttaatcacttaggtcacccagtccaagcccggcctagcacgatgatcatgagtgttgctattgatgtatgttaatactatacacagtcatcgtgtgtgttttataaaactgtaagcttaggatgtttgaggctaatgtaattagcactacaccgtaataaatgagaggtttactttatgttttaataatgttcttacccttgctgctctctaaactgtaatggcgtacggttagctaaactaaagtaaaaatcgattcgcttgagtaaaattagtgaccgggaaagatcatcgactactactgctcagagatgtaatcggtaattaagacttcaagctcaataattaattaggagtaaatctggcttcgaatttttaaattgtcaacttccaaagaaggattggcaagactcaatctcaattgcccaacaaacatatggctctttacaaatttggaatctctttttgatggcaagaacgtcgtaattcctctgtcgatctcatgtaattaccaaactcatctacttattactttctttatatgcacttactgatgcggccgcttaattaatctgacctgaccactagacctgagtgagtacagatgtgctactagtgctagcctcgaggtcgaccaacttttctatacaaagttgtctagacctaggactaggcactgagtgactcactgacctgactgagtgactggcggccgcagcttatagtaaagatttttttgttaataaaatgaaagttaatatttatggatttatttgaacatatttacaagtttttgttaataaatttatttacagaagtgttaaatttgaaaatgtgttaaatgagagttaatatttatggatataatattactttatttaaaaataaaatgaatttatattaaaatatgatttggtaaaagatattataaagaggaacttggatgagaaagacgacgatgggcaaaagttgcatggcacaccgcttttgttcagtaacatctgcactgtggcgcctttttcacactcaccatgcatgctgccacgtcagctttcacactatgacaccactggccatacacgttgccacctcagctttctcctcttctcactatgacacgactggccatgcatgcatgcatgctgccacctcagctcccgcctcttcacccgtgtctttctctcatgtcgcagtgctgcgtgccaacctcttctctctataaatagagagaagagaatgatggttaaactcaaaccaaaacaagaaaacatacacaaatagcaaaacggatccacaaccaaaaatggcgcttcgtgtcaagaccaacaagaagccatgttgggagatgaccaaggaggaactgacctctggcaaaactgaggtgttcaactatgaggaactcctggagtttgcagagggtgacatagctaaggtttttggtccggagtttgctgtcatagacaagtaccccagaagggtgaggctgcctgctcgtgaatacctgcttgtgacaagggtcacactcatggatgccgaggtcaacaactacagagttggtgccagaatggtcactgagtatgatcttccagtgaatggcgaattgtctgagggaggtgattgtccctgggcagttctggttgagagtggacagtgcgatttgatgctgatatcatacatgggaattgatttccagaaccaaggtgacagagtttaccgtctgctcaacaccacgttgacattctatggggttgcccatgagggagagacccttgagtatgacatcagagtgaccggttttgccaaacgtttggatggtggcatctccatgttcttctttgagtatgactgctatgtcaatgggaggcttctcattgagatgagagatggctgtgctggcttcttcacaaatgaggagcttgatgcgggaaagggtgtggtgttcacaagaggggatttggctgccagagctaagattccaaagcaagatgtttctccctatgctgtcgctccctgccttcacaaaacaaaactcaacgaaaaggagatgcagaccttggttgacaaagattgggcttccgtttttggctcaaagaatggcatgccggagatcaactacaaactctgcgcacgtaagatgctcatgattgatagagtcaccagcattgaccataagggaggtgtgtacggtttgggtcagttggttggtgagaaaatcttggagagggaccattggtacttcccatgccattttgttaaggatcaagtcatggctggatctcttgtcagcgacggttgttcacaaatgctcaagatgtacatgatctggctcggtttgcaccttaccaccggaccatttgacttcagacccgtcaacggacacccgaacaaagttaggtgtaggggtcagatatctcctcataagggaaagttggtctacgtcatggagatcaaagagatgggattcgacgaggataacgatccgtacgccattgctgacgtcaacatcattgacgttgatttcgaaaagggtcaagatttcagccttgatagaatcagcgactacggaaagggggatcttaacaaaaagatcgtcgtggacttcaagggcattgctctcaagatgcagaagagatccacgaacaagaacccctccaaagttcagcccgtttttgctaacggtgcagccactgtgggaccggaagcgtccaaggccagctctggtgccagtgctagtgcttctgctgcccctgcgaagcctgctttctcagcagatgttcttgcgccaaagccagttgcacttcctgaacatatcctcaagggtgacgctctcgctccgaaagaaatgtcctggcatcccatgtcaaaacttcctggcaacccgacgccgttcttctcccctagttcttaccctccgagggcaatttgcttcatccctttccctggcaacccacttgacaacaattgcaaagctggagaaatgcctctgaactggtacaacatgtcagagttcatgtgtggaaaagttagcaactgcttgggaccagagttcgcaagatttgataagtcaaatacgagcagaagccctgcttttgatttggctcttgtgactagagttgttgaagtcacaaacatggaacatggcaagttcctgaatgttgattgcaatcccagcaaaggcacaatggtgggggagtttgactgtcctcaagatgcgtggttctttgatggttcttgcaatgatgggcacatgccttattccatcatcatggaaatcggacttcagacatccggtgttctcaccagtgtgttgaaagcaccactgacgatggacaaagatgacattctctttaggaaccttgatgcaagtgctgaaatggtgaggccagatgtggatgtgagggggaaaaccataaggaatgtgaccaagtgcactggatatgcaatgttgggaaagatggggattcacagattcacgtttgagttgtctgttgatggcgtggttttctacaaaggaagcacttcctttggatggttcactccagaggtgtttgctcagcaagctggacttgacaatgggaaaaagacggagccttggtgcaaaactaacaacacgagtgtgagaagagttgaaatcgcatcagccaaaggcaaagaacagctgactgagaaacttccagatgcaactaatgctcaagttctcagaaggtcagaacagtgtgagtatttggattacctcaacattgctcctgattctgggctgcatgggaaaggatatgcgcatggacacaaagatgttaacccacaagactggttcttctcttgtcacttttggtttgatcctgtgatgcctggatctttgggaattgagtcaatgttccagctcattgaggcatttgcggtggaccagaacataccgggagaatacaatgtgagcaatccgacctttgcccatgcccctggaaaaacggcgtggaagtaccgtggtcaattgacaccaaagaaccgtgcgatggactgtgaggtgcacatagtttcaatcacagcctctcctgaaaatggaggctacgttgacatagtggcagatggagcactttgggttgatggtctccgtgtgtatgaagccaaagaactcagagttcgtgttgtcagtgcaaaacctcaagccattccggatgttcaacaacagccacccagcgcaaaagcggaccctgggaaaactggagttgcactcagtccgactcagttgagagatgtcctgcttgaagtggacaatccattgtatcttggtgttgaaaactccaatttggtgcagtttgaatccaaacctgcaacttcttcaaggattgtcagtatcaaaccatgctccataagtgatcttggtgacaagtccttcatggaaacgtacaatgtgtcagcacctctgtacactggagcaatggccaagggaattgcgtctgcggaccttgtcattgctgctgggaagaggaagatattgggttcttttggagcgggtgggcttccaatgcaccatgtgagggcagctttggagaagatacaagcggctctgcctcaaggaccatatgctgtgaacctcattcattcaccttttgacagcaacttggaaaaggggaatgttgatctcttcctcgaaaagggcgttactgtggtggaggcttctgcattcatgaccctcactccccaagttgttcgttaccgtgcagccggactctcaaggaacgctgatgggagtgtcaacatcagaaaccgtatcattggaaaagtgtccagaacagaactcgccgaaatgttcatcagaccggctccggaacacctccttgagaaactcatagcttctggtgagataacacaagaacaagccgaacttgcccgtcgtgttcctgtcgcagacgacatcgctgttgaagctgattctggtggtcacactgacaaccgtcccatccacgtcatcttgcctttgatcatcaaccttaggaacagactgcacagagagtgtggttatcctgcgcaccttagagtcagagttggagctggaggcggtgttggctgcccacaagctgctgcggctgccctcacaatgggagctgccttcatagtgactgggactgtcaatcaagttgctaaacagtccgggacatgtgacaacgtgagaaaacaactcagtcaagccacctacagtgacatttgcatggctccagcagctgatatgtttgaggaaggtgtgaaactccaagttctcaagaagggaacaatgttcccatcaagagctaacaaattgtacgaactcttttgcaagtacgactctttcgattcaatgcctcctgctgaacttgaaaggatcgagaagaggatcttcaagagggcacttcaagaggtctgggaagagaccaaggacttttacatcaatggtttgaagaatccagagaagatacagagagcggaacatgaccccaaactcaagatgtctttgtgtttcagatggtatcttggtcttgcatcacgttgggccaacatgggtgctcctgatcgtgtcatggactatcaagtctggtgtggtccagccattggagccttcaatgacttcatcaaaggaacatatcttgatcctgctgtctctaatgagtacccatgtgttgtccagatcaaccttcagattttgcgtggtgcatgttacctgaggcgtcttaatgctctgagaaatgatccgaggattgatcttgagactgaagatgctgcctttgtctatgagccaacgaatgcgctttgagtagttagcttaatcacttaggtcacccagtccaagcccggcctagcacgatgatcatgagtgttgctattgatgtatgttaatactatacacagtcatcgtgtgtgttttataaaactgtaagcttaggatgtttgaggctaatgtaattagcactacaccgtaataaatgagaggtttactttatgttttaataatgttcttacccttgctgctctctaaactgtaatggcgtacggttagctaaactaaagtaaaaatcgattcgcttgagtaaaattagtgaccgggaaagatcatcgactactactgctcagagatgtaatcggtaattaagacttcaagctcaataattaattaggagtaaatctggcttcgaatttttaaattgtcaacttccaaagaaggattggcaagactcaatctcaattgcccaacaaacatatggctctttacaaatttggaatctctttttgatggcaagaacgtcgtaattcctctgtcgatctcatgtaattaccaaactcatctacttattactttctttatatgcacttactgatgcggccgcttaattaatcacgagtggatgactgtcacgactgactcatgactgactactagtgctagcctcgaggtcgacacaactttgtataataaagttgtctagacctaggagctgtgctgggtaactcacatgagtcactggtcacatcagcggccgcagcttatagtaaagatttttttgttaataaaatgaaagttaatatttatggatttatttgaacatatttacaagtttttgttaataaatttatttacagaagtgttaaatttgaaaatgtgttaaatgagagttaatatttatggatataatattactttatttaaaaataaaatgaatttatattaaaatatgatttggtaaaagatattataaagaggaacttggatgagaaagacgacgatgggcaaaagttgcatggcacaccgcttttgttcagtaacatctgcactgtggcgcctttttcacactcaccatgcatgctgccacgtcagctttcacactatgacaccactggccatacacgttgccacctcagctttctcctcttctcactatgacacgactggccatgcatgcatgcatgctgccacctcagctcccgcctcttcacccgtgtctttctctcatgtcgcagtgctgcgtgccaacctcttctctctataaatagagagaagagaatgatggttaaactcaaaccaaaacaagaaaacatacacaaatagcaaaacggatccacaaccaaaaatgcttcagcacacttggcttccgaagcctcccaatctgaccctcttgtcagatgaggttcatctctggaggattcctcttgaccagcctgagtcacaacttcaagaccttgctgccaccctgagcagtgatgaattggcgagggcaaacagattctactttccagaacacagaaggcgtttcactgctgggagaggcatcctcagatccatcttgggtggatacttgggagtggaaccgggtcaagtcaagtttgattatgagtcccgtgggaaaccgatccttggtgacagatttgctgagagtggactcctgttcaacttgtctcacagccagaaccttgccttgtgtgctgtcaactacacgcgtcaaataggcattgatcttgaatatctgcgtccaacatctgacttggagtctcttgcaaagaggttctttctcccaagagaatatgaactcttgaggtcactccctgatgagcagaaacagaagattttctttcgttactggacttgcaaagaggcttatctcaaagcaacgggagatggaatagccaaacttgaagagatcgagatagcactcaccccaacagaacctgccaagctccaaacagctcctgcgtggtctctgttggagcttgtgccagatgacaattgtgttgcagctgtggctgttgcgggttttggttggcagcccaagttctggcattactgagtagttagcttaatcacttaggtcacccagtccaagcccggcctagcacgatgatcatgagtgttgctattgatgtatgttaatactatacacagtcatcgtgtgtgttttataaaactgtaagcttaggatgtttgaggctaatgtaattagcactacaccgtaataaatgagaggtttactttatgttttaataatgttcttacccttgctgctctctaaactgtaatggcgtacggttagctaaactaaagtaaaaatcgattcgcttgagtaaaattagtgaccgggaaagatcatcgactactactgctcagagatgtaatcggtaattaagacttcaagctcaataattaattaggagtaaatctggcttcgaatttttaaattgtcaacttccaaagaaggattggcaagactcaatctcaattgcccaacaaacatatggctctttacaaatttggaatctctttttgatggcaagaacgtcgtaattcctctgtcgatctcatgtaattaccaaactcatctacttattactttctttatatgcacttactgatgcggccgcttaattaactactgtcactgaggccgtagacgagtacggactgatctaactagtgctagcctcgaggtcgacacccagcttt

SEQ ID NO: 48 - DNA, 42674 bp, Artificial sequence
  plasmid pDAB9344
gtacaaaaaagcaggcttctagacctaggtggagtcatcacgcagactatctcagcatgtgcgtagcacgcggccgcctcccagtatcattatagtgaaagttttggctctctcgccggtggttttttacctctatttaaaggggttttccacctaaaaattctggtatcattctcactttacttgttactttaatttctcataatctttggttgaaattatcacgcttccgcacacgatatccctacaaatttattatttgttaaacattttcaaaccgcataaaattttatgaagtcccgtctatctttaatgtagtctaacattttcatattgaaatatataatttacttaattttagcgttggtagaaagcataatgatttattcttattcttcttcatataaatgtttaatatacaatataaacaaattctttaccttaagaaggatttcccattttatattttaaaaatatatttatcaaatatttttcaaccacgtaaatctcataataataagttgtttcaaaagtaataaaatttaactccataatttttttattcgactgatcttaaagcaacacccagtgacacaactagccatttttttctttgaataaaaaaatccaattatcattgtattttttttatacaatgaaaatttcaccaaacaatgatttgtggtatttctgaagcaagtcatgttatgcaaaattctataattcccatttgacactacggaagtaactgaagatctgcttttacatgcgagacacatcttctaaagtaattttaataatagttactatattcaagatttcatatatcaaatactcaatattacttctaaaaaattaattagatataattaaaatattacttttttaattttaagtttaattgttgaatttgtgactattgatttattattctactatgtttaaattgttttatagatagtttaaagtaaatataagtaatgtagtagagtgttagagtgttaccctaaaccataaactataagatttatggtggactaattttcatatatttcttattgcttttaccttttcttggtatgtaagtccgtaactggaattactgtgggttgccatgacactctgtggtcttttggttcatgcatggatcttgcgcaagaaaaagacaaagaacaaagaaaaaagacaaaacagagagacaaaacgcaatcacacaaccaactcaaattagtcactggctgatcaagatcgccgcgtccatgtatgtctaaatgccatgcaaagcaacacgtgcttaacatgcactttaaatggctcacccatctcaacccacacacaaacacattgcctttttcttcatcatcaccacaaccacctgtatatattcattctcttccgccacctcaatttcttcacttcaacacacgtcaacctgcatatgcgtgtcatcccatgcccaaatctccatgcatgttccaaccaccttctctcttatataatacctataaatacctctaatatcactcacttctttcatcatccatccatccagagtactactactctactactataataccccaacccaactcatattcaatactactctaggatccacaaccaaaaatggcttcctctatgctctcttccgctactatggttgcctctccggctcaggccactatggtcgctcctttcaacggacttaagtcctccgctgccttcccagccacccgcaaggctaacaacgacattacttccatcacaagcaacggcggaagagttaactgcatgcaggtgtggcctccgattggaaagaagaagtttgagactctctcttaccttcctgaccttaccgattccgaagcagcgaggctgcaagagcagaaaggaggtgagatggacacgaggattgcgatcataggcatgagcgccatacttccttgtggaaccacggtgagagagtcatgggagaccataagggctggcattgattgcctgtctgatcttcctgaggatcgtgttgatgtgactgcgtactttgacccagtcaagaccacaaaggacaaaatctactgcaagagaggaggtttcattcctgagtatgactttgatgcgcgtgagtttggtctcaacatgttccagatggaagattctgatgcgaatcagaccatctcacttctcaaggtcaaagaagcacttcaagatgctgggattgatgcacttggaaaggagaagaaaaacataggatgcgtgcttggcattggaggtggacagaagagttcacatgagttctacagcagactcaactatgtggttgtggagaaagtcttgagaaagatggggatgccagaggaagatgtcaaagtggctgtggagaagtacaaagcgaacttcccagaatggagacttgactctttccctggattccttgggaatgtcactgctggcagatgcaccaacacattcaacttggatggcatgaactgcgttgtggatgctgcatgtgcaagctccttgatagcagtcaaggttgcgattgatgaactgctctatggtgactgcgacatgatggtcactggtgcaacctgcacagacaactccattgggatgtacatggctttctcaaagacacctgtgttcagcacggacccaagtgtgagagcgtatgatgagaaaacgaaagggatgctcattggtgagggatcagccatgttggtgctcaaacgttatgcagatgcagtgagggatggtgatgagattcatgctgtgattcgtggttgtgcaagctcaagtgatggcaaagcagctggcatctacactcccacaatcagtggtcaagaggaagccttgagacgtgcatacaatcgtgcctgcgttgaccctgccactgtcactttggttgagggtcatgggactggcactccagttggagataggattgagttgactgcgttgaggaacttgtttgacaaagcgtatggtgaagggaacacagagaaagttgcagttggaagtatcaagtccagtattggtcatttgaaggctgttgctggtcttgctggaatgatcaaggtcatcatggctctcaaacacaagactttgcctggaacgatcaatgtggacaatccacccaatctctatgacaacactcccatcaatgagtcatccctctacatcaacacgatgaacagaccctggttccctccacctggtgttccgagacgtgctggaatatccagctttggctttggaggtgccaactaccatgcagtgttggaagaggctgaaccagagcacacgacagcgtacagactcaacaaacgtccacaaccggtgttgatgatggctgcaactcctgctgcgttgcagagcctttgtgaagctcagctgaaagagtttgaagctgcgatcaaggagaatgagacagtcaagaatactgcctacatcaagtgtgtcaagtttggagaacagttcaagttccctgggagcatacctgcgaccaatgcgagactgggattcttggtcaaagatgcggaggatgcgtgctccacgcttcgtgctatatgtgctcagtttgccaaagatgtgaccaaagaagcgtggaggcttccgagagaaggagtttctttccgtgccaaaggcattgccaccaatggtgctgttgctgcactcttctctggacaaggtgctcagtacacacacatgttcagtgaagttgcgatgaactggcctcagttcagacagtccattgctgcaatggacgctgcacagtccaaggttgctggaagtgacaaagactttgaaagagtctctcaagtcctgtacccaaggaaaccgtacgaacgtgagccagaacaagatcacaagaaaatctcactcacagcatacagccagccgtcaaccctggcatgtgctcttggtgcctttgagattttcaaggaagctggattcactccagactttgcagctggacacagcttgggtgagtttgctgcgctctatgcagctggttgtgttgacagagatgagttgtttgaacttgtttgcagaagggcaaggatcatgggaggcaaagatgcacctgccacacccaaaggttgcatggcagctgtcataggacccaacgcagagaacatcaaggttcaagctgccaacgtctggcttggaaactcaaactctccgtctcagactgtcattactgggtctgttgaagggattcaagctgaaagtgccagattgcagaaggaagggttcagagttgtgcctcttgcttgtgagtctgccttccattctccacagatggaaaatgccagctcagctttcaaagatgtcatatccaaggtttccttccgtacacccaaagcagaaacaaagctcttcagcaatgtttctggagagacctatccgacggatgccagagagatgctcactcaacacatgacctcatctgtgaagttcctgacccaagtgaggaacatgcaccaagctggtgcgagaatctttgttgagtttggaccgaaacaagttctcagcaaacttgtttctgaaaccctcaaagatgacccgtctgttgtcacagtgtctgtgaacccagcttctggcacggactctgacatacagttgagggatgctgcagttcagctggttgtggctggtgtcaatcttcaagggtttgacaagtgggatgctcctgatgccacgaggatgcaagccatcaagaaaaagagaaccacactcagactttcagctgccacctatgtcagtgacaagaccaagaaagtgagggatgctgccatgaacgacggaagatgtgtcacatacctcaagggtgctgcaccactcatcaaggctcctgaacctgtggttgacgaagctgccaagagggaggctgaaaggcttcagaaggagcttcaagacgctcagaggcagcttgacgacgccaaacgtgcagctgcagaagccaactccaaacttgctgctgccaaggaggaagccaagactgctgcagcttcagccaagcctgcagttgacactgctgttgtggagaaacatcgtgccatcctcaagtccatgctggctgagctggatggttatggaagtgttgatgcttcttcccttcagcaacagcaacagcaacagactgctccggcgcctgttaaagccgctgcccctgccgctcccgttgcaagtgctcctgctcccgccgtgtccaacgagttgcttgagaaagctgagacagttgtgatggaggttctcgctgccaagactggatacgaaacagacatgattgaggcggacatggagcttgagactgagttgggaattgacagcatcaagagggttgaaattctttctgaagtccaagctatgcttaacgttgaggcgaaagatgttgatgctctctctaggacgagaacagtgggtgaagttgtcaacgctatgaaggcagaaatcgctggttcttccgctccggcgccggcagctgccgcacctgcaccggctaaagcggctccagctgcagctgcaccagctgtttctaatgagctgctcgaaaaggcagaaactgttgtgatggaagtccttgctgccaaaactggctacgaaactgacatgatagaatcagacatggagcttgagacggagcttggaattgattccatcaagcgtgtggaaatcctcagtgaagtccaagccatgctcaatgtggaagctaaggatgtggatgctctctcaaggaccagaactgtcggtgaggttgtcaatgccatgaaggctgagatagctggaggctccgctcctgcgccggccgctgccgctcctggtcccgctgccgcggctccagctccagctgcagccgctccggccgtctcaaacgaactccttgaaaaagctgagaccgtcgtgatggaggtcttggcagctaaaaccggctatgagactgacatgattgagtctgacatggaattggagacagaacttgggatagacagcatcaaacgtgttgaaatcctcagtgaggtccaagctatgctgaacgtggaagcgaaggatgttgatgctctgtccagaacgaggaccgttggtgaggttgtggatgccatgaaggctgaaattgctggagggtctgcgcccgcgccagctgcagccgctcctgcacccgcagccgcggcacctgctccagctgcacctgcacctgccgtttcttcagaactcttggagaaggctgagacggttgtgatggaggttttggctgcaaagactggctatgagaccgacatgattgaatctgatatggaattggagacagagcttgggatcgattccatcaaaagagtggagatcctgagtgaagtccaagccatgctcaatgttgaagctaaggatgttgatgcactttcaagaacaaggacagtgggtgaggttgtggatgccatgaaggcggagattgctggagggagcgcgcctgcgccagctgccgcggcacctgcaccggcagccgcagctccagctccagctgcaccagcaccggccgcgcccgcgccagctgtttcatccgaactcctggaaaaggccgagacggttgtgatggaggtgctcgcagctaagactggttacgagaccgacatgattgaaagtgacatggagcttgaaaccgagttgggaatagatagcatcaaacgtgttgaaatcttgtctgaggtccaagctatgttgaacgtggaggcaaaagatgtcgatgcgctttcaagaaccagaacagtcggtgaggtcgtggacgccatgaaggctgaaattgccggaagctctgctagtgcgccagctgcagccgcacctgcacctgctgccgcggcacctgctccagctgcagccgctcctgccgtcagcaatgagttgctggagaaagccgaaacagttgtgatggaagtccttgctgcaaaaactggttacgaaacggacatgattgagtcagacatggaattggagaccgaacttggaatagattccatcaagagagtggagatcctctctgaggtgcaagccatgctcaacgttgaggctaaagatgttgatgcactcagtaggacaagaactgtgggggaagttgtcgatgcgatgaaggctgagattgctggaggctctgctcctgcgccggcagctgccgcacctgcacccgcagccgcggcaccagctgtcagcaacgaattgcttgagaaggctgaaacagttgtcatggaagtgctggctgcaaaaaccggctatgagactgacatgattgagtctgacatggaacttgagacggaattgggcattgacagcatcaagcgtgttgagatcctcagtgaagtccaagcaatgctcaatgtggaggctaaggatgtggatgccctctcaaggaccagaacagttggtgaggtcgttgatgcgatgaaggcggagatcgctggaagttccgcgcctgcgccagctgcagccgctcctgcacccgcagccgcggcaccggctccagctgcagccgcaccggccgtctcctcagaactcctggaaaaggctgagacagttgtgatggaagtccttgctgcgaaaactggctatgagaccgacatgattgaatctgacatggaactggagaccgagcttggaattgactccatcaaacgtgttgaaatcctctctgaggttcaagcgatgttgaatgtggaggccaaagatgttgatgctctttccagaacaaggacggtgggagaggtggttgatgccatgaaggctgagatagctgggggttctgctcctgcgccagctgcagccgctcctgctcccgctgccgcggcaccagctgtcagcaacgaactccttgaaaaagctgaaactgttgtgatggaggttttggctgcaaagactggatacgagactgacatgatagagtcagacatggagttggaaacagagcttgggattgatagcatcaagcgtgtggaaatcctttctgaggttcaagccatgctgaacgttgaggccaaagatgtcgatgctttgtcaaggaccagaacggttggagaagtggtcgatgccatgaaggctgagatagctggtggatcagcccctgctccggctgcagccgctcctgcaagtgccggtgctgcaccagctgtgaagattgattcagttcatggtgctgactgtgacgatttgtcactgatgcacgcaaaggtggttgacatcagaaggccagatgaactgattctggaaagaccggagaaccgtccagttcttgtcgttgacgatggctcagagttgacacttgctcttgtgagggtgttgggagcctgtgcagttgtcttgacctttgagggattgcagttggctcagagagctggtgcagctgccattcgtcatgttctggctaaggacctttcagcagaatcagctgagaaggccatcaaagaggctgagcaaagatttggagcgttgggaggcttcataagccagcaagcagaaaggtttgaaccagctgagatactgggtttcacactcatgtgtgcgaagtttgccaaagcctctctctgcactgctgtggctggaggtcgtcctgccttcatcggtgtggctaggcttgacggcagacttggattcacctctcaaggcacttctgacgcactcaagagagcacagcgtggagcgatctttggactctgcaagacaatagggttggagtggtcagaatctgatgtgttcagccgtggtgtggacattgctcaagggatgcacccagaagatgctgcagttgccatagttagggagatggcgtgtgctgacatcagaatcagagaggttgggattggagcaaaccagcaaagatgcacaatcagagctgccaagttggagactgggaaccctcagagacagatagcgaaagacgatgtgcttctggtttctggaggtgctcgtgggatcacacctctttgcatccgtgagatcacgcgtcagattgctggaggcaagtacattctgttgggtcgtagcaaagtttctgcgtctgaaccagcatggtgtgctggcatcactgatgagaaggctgtgcagaaagctgccacccaagagttgaagagggccttcagtgctggtgaaggacccaaacccactccaagggctgtcacgaaacttgtgggatctgttcttggtgctcgtgaagtgagaagctccattgctgccattgaagctctgggtggcaaagcgatctacagctcttgtgatgtgaactctgctgcagatgttgccaaagcagttagggatgcagagtcccagcttggtgccagagttagtggaatcgttcacgcttctggtgtgctccgtgatcgtctcatagagaagaaactccctgacgagtttgatgctgtctttgggaccaaagtcactgggttggagaatcttctggctgcagttgatcgtgccaacctcaaacacatggttctcttcagctcccttgctggtttccacggcaatgttggtcagtctgactatgcgatggcaaacgaagctctcaacaagatgggtttggaacttgcgaaggatgtcagtgtcaagtccatctgctttggtccctgggatggtgggatggtgacacctcaactcaagaaacagtttcaagaaatgggagttcagatcattcctcgtgaaggaggtgctgatacagttgcgaggattgtgttgggatcaagtcctgctgagatccttgttggaaactggaggacaccatccaagaaagttggaagtgacacgatcaccctgcatagaaagatcagtgccaagtccaatcccttcttggaggatcatgtcatacaaggcagaagggtgttgccaatgacccttgctattgggagccttgctgagacctgccttggactcttccctggctactctctctgggccatagatgacgcacagctcttcaaaggtgtcactgttgatggagacgtcaactgtgaagtgaccctcacaccgtccactgctccgagtgggagggtgaatgtccaagcgacgctcaagacgttctcaagtggaaaacttgttccagcctacagagctgtcatagtgttgtccaaccaaggtgctccacctgccaatgcaaccatgcagcctccgagccttgatgcagatcctgctttgcaagggtcagtctatgatggcaagactctctttcatggtcctgcgttcagaggcattgatgacgttctcagctgcaccaagagccagcttgttgccaagtgttctgctgttcctggatcagatgcagccagaggagagtttgcaactgacactgatgcacatgatccctttgtcaatgatcttgcctttcaagcaatgttggtctgggtgaggagaacgctgggacaagctgcactcccgaactccattcagaggatagtccaacacagaccggtcccacaagacaaacccttctacatcaccctcagatccaatcagagtggtggacatagccagcacaaacatgcacttcagttccacaacgaacaaggtgatctcttcattgatgttcaagcctctgtcattgcgacagactcacttgcgttctgagtagttagcttaatcacttaggtcaccagtatgaactaaaatgcatgtaggtgtaagagctcatggagagcatggaatattgtatccgaccatgtaacagtataataactgagctccatctcacttcttctatgaataaacaaaggatgttatgatatattaacactctatctatgcaccttattgttctatgataaatttcctcttattattataaatcatctgaatcgtgacggcttatggaatgcttcaaatagtacaaaaacaaatgtgtactataagactttctaaacaattctaactttagcattgtgaacgagacataagtgttaagaagacataacaattataatggaagaagtttgtctccatttatatattatatattacccacttatgtattatattaggatgttaaggagacataacaattataaagagagaagtttgtatccatttatatattatatactacccatttatatattatacttatccacttatttaatgtctttataaggtttgatccatgatatttctaatattttagttgatatgtatatgaaaaggtactatttgaactctcttactctgtataaaggttggatcatccttaaagtgggtctatttaattttattgcttcttacagataaaaaaaaaattatgagttggtttgataaaatattgaaggatttaaaataataataaataataaataacatataatatatgtatataaatttattataatataacatttatctataaaaaagtaaatattgtcataaatctatacaatcgtttagccttgctggaacgaatctcaattatttaaacgagagtaaacatatttgactttttggttatttaacaaattattatttaacactatatgaaattttttttttttatcagcaaagaataaaattaaattaagaaggacaatggtgtcccaatccttatacaaccaacttccacaagaaagtcaagtcagagacaacaaaaaaacaagcaaaggaaattttttaatttgagttgtcttgtttgctgcataatttatgcagtaaaacactacacataacccttttagcagtagagcaatggttgaccgtgtgcttagcttcttttattttatttttttatcagcaaagaataaataaaataaaatgagacacttcagggatgtttcaacccttatacaaaaccccaaaaacaagtttcctagcaccctaccaacgaattcgcggccgcttaattaagatgagtgatactcaggactcaggactcactctgctgatcactagtgctagcctcgaggtcgacacaactttgtatacaaaagttgtctagacctaggctcagcaactcatccagtcaagttcgagtcagtgagttgggcggccgcctcccagtatcattatagtgaaagttttggctctctcgccggtggttttttacctctatttaaaggggttttccacctaaaaattctggtatcattctcactttacttgttactttaatttctcataatctttggttgaaattatcacgcttccgcacacgatatccctacaaatttattatttgttaaacattttcaaaccgcataaaattttatgaagtcccgtctatctttaatgtagtctaacattttcatattgaaatatataatttacttaattttagcgttggtagaaagcataatgatttattcttattcttcttcatataaatgtttaatatacaatataaacaaattctttaccttaagaaggatttcccattttatattttaaaaatatatttatcaaatatttttcaaccacgtaaatctcataataataagttgtttcaaaagtaataaaatttaactccataatttttttattcgactgatcttaaagcaacacccagtgacacaactagccatttttttctttgaataaaaaaatccaattatcattgtattttttttatacaatgaaaatttcaccaaacaatgatttgtggtatttctgaagcaagtcatgttatgcaaaattctataattcccatttgacactacggaagtaactgaagatctgcttttacatgcgagacacatcttctaaagtaattttaataatagttactatattcaagatttcatatatcaaatactcaatattacttctaaaaaattaattagatataattaaaatattacttttttaattttaagtttaattgttgaatttgtgactattgatttattattctactatgtttaaattgttttatagatagtttaaagtaaatataagtaatgtagtagagtgttagagtgttaccctaaaccataaactataagatttatggtggactaattttcatatatttcttattgcttttaccttttcttggtatgtaagtccgtaactggaattactgtgggttgccatgacactctgtggtcttttggttcatgcatggatcttgcgcaagaaaaagacaaagaacaaagaaaaaagacaaaacagagagacaaaacgcaatcacacaaccaactcaaattagtcactggctgatcaagatcgccgcgtccatgtatgtctaaatgccatgcaaagcaacacgtgcttaacatgcactttaaatggctcacccatctcaacccacacacaaacacattgcctttttcttcatcatcaccacaaccacctgtatatattcattctcttccgccacctcaatttcttcacttcaacacacgtcaacctgcatatgcgtgtcatcccatgcccaaatctccatgcatgttccaaccaccttctctcttatataatacctataaatacctctaatatcactcacttctttcatcatccatccatccagagtactactactctactactataataccccaacccaactcatattcaatactactctaggatccacaaccaaaaatggcttcctctatgctctcttccgctactatggttgcctctccggctcaggccactatggtcgctcctttcaacggacttaagtcctccgctgccttcccagccacccgcaaggctaacaacgacattacttccatcacaagcaacggcggaagagttaactgcatgcaggtgtggcctccgattggaaagaagaagtttgagactctctcttaccttcctgaccttaccgattccgaagctgcaaggaacgtgagtgcggctcatgagatgcatgacgagaagaggatagctgttgtgggcatggctgttcagtatgctggatgcaaaacgaaagacgagttctgggaagttctcatgaatggaaaagttgagagcaaagtgatcagcgacaaacgtcttggttcaaattaccgtgctgaacactacaaagctgaaaggagcaagtatgctgacaccttctgcaatgagacatatggaactcttgatgagaacgaaatagacaatgagcatgaactccttttgaaccttgccaaacaagccttggctgaaacatctgtcaaagattcaacaagatgtggcatagtttctggatgcctcagcttcccgatggacaacctccaaggtgaactcttgaatgtgtaccagaaccatgttgagaagaaacttggtgccagagttttcaaagatgcctctcactggtcagaaagagaacagtccaacaaaccagaggctggtgacagaagaatcttcatggaccctgcttcctttgttgctgaggaactcaatcttggcgctctccactactctgttgatgctgcctgtgccactgcgctctatgtgctcagactggcgcaagatcacttggtctctggtgcagctgatgtgatgctttgtggtgcaacatgcctgccggagccgtttttcatactctctgggttctcaaccttccaagccatgcctgttggaacgggtcagaatgtgtccatgccgctgcacaaagattctcaaggattgacccctggtgaaggaggttccatcatggtcctcaaacgtttggatgacgcaatcagagatggagatcacatctatggaacacttttgggagccaatgtcagcaacagtggcactggtctgccacttaaaccccttttgccgtcagagaaaaagtgcctcatggacacctacacacgtatcaatgtgcatccccacaagattcagtatgttgaatgccatgcaactgggactccacaaggtgatcgtgtggaaattgatgctgtgaaggcttgctttgaaggcaaagtcccacgttttggaaccacaaaagggaactttggacacacattggtggcagctgggtttgctggcatgtgcaaagtgcttctctccatgaagcacgggatcattccacccactccgggaatagatgacgaaacgaagatggaccctctggttgtctctggtgaggccattccctggccagaaacgaatggagaaccgaagcgtgctggtctctcagcgtttggatttggtgggaccaatgctcatgctgtctttgaggaacatgacccaagcaatgctgcatgcactggccatgactccatttctgctctctctgcacgttgtggtggtgagtcaaacatgagaatagcaatcactgggatggatgccacttttggtgctttgaaaggattggatgcttttgaaagggccatctacactggtgctcatggtgctataccactcccagaaaagagatggagattcctggggaaagacaaggacttccttgatctttgtggagtcaaagcaacaccgcatggctgttacattgaagatgttgaagttgatttccagaggctgaggactccaatgactcctgaagatatgctcttgcctcaacagcttctggctgtcaccacaattgatagggccatattggactctggcatgaagaaaggtggaaatgtggctgtctttgtggggttggggaccgatcttgaactctaccgtcaccgtgcaagggttgctctcaaggagagagtgaggcctgaagccagcaagaaactcaatgacatgatgcagtacatcaatgattgtgggacaagcacttcttacaccagctacataggcaacttggttgcaacaagggtcagttcacaatggggcttcacgggaccttccttcacaatcacagaaggcaacaattctgtgtacagatgtgctgaacttggcaaatacctcttggaaacgggagaggttgatggggttgtggttgcgggtgttgatctctgtgggagtgctgagaacctttacgtcaagtcaaggcgtttcaaggtgtctacatctgacaccccgagagccagctttgatgcagctgctgatggttactttgttggagagggctgtggtgcatttgtgctcaagcgtgagacaagctgcaccaaggatgacagaatctatgcttgcatggatgccatagttcctggaaatgttccatctgcatgtttgagagaggcattggatcaagccagagtcaagcctggagacatcgagatgttggagctttctgctgattcagcgaggcatttgaaggacccgtctgttctcccaaaggaactcactgctgaggaagagattggcggacttcagacgattcttcgtgacgatgacaagctcccaaggaatgttgcaactggaagtgtcaaggccactgttggtgacactggttatgcttctggtgctgccagtttgattaaggctgcgctttgcatctacaaccgttacctgcccagcaatggagatgactgggatgaacctgcacctgaagcaccctgggacagcacactctttgcgtgccagacctcaagagcttggttgaagaaccctggtgagagacgttatgcggctgtttccggagtcagtgaaaccagaagttgctacagtgtgctgctttctgaagcagagggacactacgagagagagaacagaatcagtttggatgaggaagcacccaagctcattgtgttgagagcagactcccatgaagagattcttggaagattggacaagataagggaaaggttcttgcagcccacgggtgctgcacccagagagtctgaattgaaggcgcaagcccgtaggatctttcttgaactccttggtgagacccttgcccaagatgcagcttcatctggaagtcagaagccccttgctctcagcttggtctccactccatccaagctccagagagaggtggaacttgcggcaaaaggcattccgagatgtctcaagatgagacgtgattggagttcccctgctggaagcagatatgcgcctgagcctttggccagtgacagagttgccttcatgtatggagaaggaaggagcccttactatggcatcacacaagacattcataggatttggcctgaacttcatgaggtcatcaatgagaaaacaaaccgtctctgggctgaaggtgacagatgggtcatgccaagggccagcttcaagagtgagcttgagtcacaacagcaagagtttgacagaaacatgattgaaatgttccgtcttggaatcctcacctcaattgccttcacaaacctggcgagagatgttctcaacatcacgcccaaagcagcctttggactcagtttgggagagatttccatgatctttgctttctccaagaaaaacggtttgataagcgatcagttgacaaaggatttgagagagtcagatgtctggaacaaagctctggctgttgagttcaatgcgctcagagaagcctggggcattccacagtctgtcccaaaagatgagttctggcaaggttacatagtgaggggaacgaaacaagacatagaagcagccatagcaccagactcaaagtatgtgaggttgaccatcatcaatgatgccaacactgctctcatcagtggaaagcctgatgcatgcaaagctgcgattgctcgtcttggtggcaacatccctgcgcttccagtcactcaaggcatgtgtgggcattgcccagaggtgggaccttacaccaaggacatcgcaaagatccacgccaaccttgagttccctgtggttgatggtcttgatctctggactaccataaaccagaagaggcttgtgccaagagccacgggtgccaaagatgaatgggctccttcatcctttggggagtatgctggacagctctatgagaaacaagccaacttccctcagatagttgaaaccatctacaagcagaactatgatgtgtttgttgaagttgggccaaacaatcacagaagcacagcagtgagaaccacgcttggaccacagagaaaccaccttgctggtgccatagacaagcagaacgaggatgcttggacgacaatagtcaagctcgtggcttcattgaaggctcaccttgttcctggagtgaccatcagtccgctctaccactccaagctcgttgcagaggctgaggcttgttatgctgcgctctgtaaaggtgagaaacccaagaaaaacaagtttgtgagaaagattcagttgaatggcagattcaacagcaaggcagaccccatctcctcagcagaccttgcatccttcccacctgcggaccctgcgattgaagctgccatctcttcaaggatcatgaagcctgtggctccgaaattctatgcgcgtctcaacattgatgagcaagatgagaccagagatccgatcttgaacaaggacaatgcgccttccagctccagctcttccagcagttcctcttccagcagttcatctccgtctcctgctccttcagctccagttcagaagaaagctgccccagctgcggagacaaaagctgttgccagtgctgatgcacttcgtagtgccctgcttgatcttgactccatgcttgcgctcagctctgcaagtgcttctggcaaccttgttgagactgcgccatctgatgccagtgtcattgtccctccgtgcaacattgctgatcttggcagcagagctttcatgaaaacttatggtgtttctgcgcctctgtacaccggtgcaatggccaagggaattgcctctgcggacttggtgatcgcagctggaaggcaaggaatccttgcgtcatttggtgctggaggccttccaatgcaagttgtgcgtgagtccattgaaaagattcaagctgccctgcccaatggaccatatgctgtcaacctcatccattctccttttgacagcaaccttgagaagggaaatgttgatctcttcttggaaaagggtgtcacttttgttgaggcttcagccttcatgacgttgacaccgcaagttgtcagatacagagcggctgggttgacgaggaatgcagatgggtcagtcaacataaggaacagaatcattgggaaagtctccagaactgagctggctgaaatgttcatgcgtcctgcacctgagcatcttttgcagaagctcattgcttctggggagatcaatcaagaacaagctgagttggccagacgtgttcctgtggctgatgacattgcggttgaagctgattctggtggacacactgacaaccgtccaatccatgtcattctgcctctgattatcaacctgagggataggcttcacagagagtgtggatacccagcaaacctgagggttcgtgttggtgctgggggtggcattgggtgtccccaagctgcgctggcaactttcaacatgggtgcctctttcattgtcactggaacagtgaaccaagttgccaaacaatctgggacgtgtgacaatgtgaggaaacagcttgcgaaagcaacttactcagatgtttgcatggcaccggcagctgacatgtttgaggaaggtgtgaaacttcaagttttgaagaaaggaacaatgttcccttcaagagccaacaaactctatgagttgttctgcaagtatgattcttttgagtccatgcctccagcagagcttgcgagggttgagaaaagaatcttcagtcgtgcattggaagaggtctgggatgagaccaagaacttctacatcaaccgtctccacaacccagagaagatacagagggctgagagggaccccaaactgaagatgtcactgtgtttcagatggtatctgtccctggcttcaaggtgggccaacactggagcttctgacagagtcatggactaccaagtttggtgtggtcctgccattggttcattcaatgatttcatcaaaggaacttaccttgatccggcagtggcaaatgagtacccgtgtgttgtgcagatcaacaaacagattcttagaggagcgtgcttcttgaggcgtcttgaaatactgagaaatgcaaggctttcagatggtgcagctgcacttgtggcgagcattgatgacacatatgtccctgctgagaagctgtgagtagttagcttaatcacttaggtcaccagtatgaactaaaatgcatgtaggtgtaagagctcatggagagcatggaatattgtatccgaccatgtaacagtataataactgagctccatctcacttcttctatgaataaacaaaggatgttatgatatattaacactctatctatgcaccttattgttctatgataaatttcctcttattattataaatcatctgaatcgtgacggcttatggaatgcttcaaatagtacaaaaacaaatgtgtactataagactttctaaacaattctaactttagcattgtgaacgagacataagtgttaagaagacataacaattataatggaagaagtttgtctccatttatatattatatattacccacttatgtattatattaggatgttaaggagacataacaattataaagagagaagtttgtatccatttatatattatatactacccatttatatattatacttatccacttatttaatgtctttataaggtttgatccatgatatttctaatattttagttgatatgtatatgaaaaggtactatttgaactctcttactctgtataaaggttggatcatccttaaagtgggtctatttaattttattgcttcttacagataaaaaaaaaattatgagttggtttgataaaatattgaaggatttaaaataataataaataataaataacatataatatatgtatataaatttattataatataacatttatctataaaaaagtaaatattgtcataaatctatacaatcgtttagccttgctggaacgaatctcaattatttaaacgagagtaaacatatttgactttttggttatttaacaaattattatttaacactatatgaaattttttttttttatcagcaaagaataaaattaaattaagaaggacaatggtgtcccaatccttatacaaccaacttccacaagaaagtcaagtcagagacaacaaaaaaacaagcaaaggaaattttttaatttgagttgtcttgtttgctgcataatttatgcagtaaaacactacacataacccttttagcagtagagcaatggttgaccgtgtgcttagcttcttttattttatttttttatcagcaaagaataaataaaataaaatgagacacttcagggatgtttcaacccttatacaaaaccccaaaaacaagtttcctagcaccctaccaacgaattcgcggccgcttaattaatctgacctgaccactagacctgagtgagtacagatgtgctactagtgctagcctcgaggtcgaccaacttttctatacaaagttgtctagacctaggactaggcactgagtgactcactgacctgactgagtgactggcggccgcctcccagtatcattatagtgaaagttttggctctctcgccggtggttttttacctctatttaaaggggttttccacctaaaaattctggtatcattctcactttacttgttactttaatttctcataatctttggttgaaattatcacgcttccgcacacgatatccctacaaatttattatttgttaaacattttcaaaccgcataaaattttatgaagtcccgtctatctttaatgtagtctaacattttcatattgaaatatataatttacttaattttagcgttggtagaaagcataatgatttattcttattcttcttcatataaatgtttaatatacaatataaacaaattctttaccttaagaaggatttcccattttatattttaaaaatatatttatcaaatatttttcaaccacgtaaatctcataataataagttgtttcaaaagtaataaaatttaactccataatttttttattcgactgatcttaaagcaacacccagtgacacaactagccatttttttctttgaataaaaaaatccaattatcattgtattttttttatacaatgaaaatttcaccaaacaatgatttgtggtatttctgaagcaagtcatgttatgcaaaattctataattcccatttgacactacggaagtaactgaagatctgcttttacatgcgagacacatcttctaaagtaattttaataatagttactatattcaagatttcatatatcaaatactcaatattacttctaaaaaattaattagatataattaaaatattacttttttaattttaagtttaattgttgaatttgtgactattgatttattattctactatgtttaaattgttttatagatagtttaaagtaaatataagtaatgtagtagagtgttagagtgttaccctaaaccataaactataagatttatggtggactaattttcatatatttcttattgcttttaccttttcttggtatgtaagtccgtaactggaattactgtgggttgccatgacactctgtggtcttttggttcatgcatggatcttgcgcaagaaaaagacaaagaacaaagaaaaaagacaaaacagagagacaaaacgcaatcacacaaccaactcaaattagtcactggctgatcaagatcgccgcgtccatgtatgtctaaatgccatgcaaagcaacacgtgcttaacatgcactttaaatggctcacccatctcaacccacacacaaacacattgcctttttcttcatcatcaccacaaccacctgtatatattcattctcttccgccacctcaatttcttcacttcaacacacgtcaacctgcatatgcgtgtcatcccatgcccaaatctccatgcatgttccaaccaccttctctcttatataatacctataaatacctctaatatcactcacttctttcatcatccatccatccagagtactactactctactactataataccccaacccaactcatattcaatactactctaggatccacaaccaaaaatggcttcctctatgctctcttccgctactatggttgcctctccggctcaggccactatggtcgctcctttcaacggacttaagtcctccgctgccttcccagccacccgcaaggctaacaacgacattacttccatcacaagcaacggcggaagagttaactgcatgcaggtgtggcctccgattggaaagaagaagtttgagactctctcttaccttcctgaccttaccgattccgaagcgcttcgtgtcaagaccaacaagaagccatgttgggagatgaccaaggaggaactgacctctggcaaaactgaggtgttcaactatgaggaactcctggagtttgcagagggtgacatagctaaggtttttggtccggagtttgctgtcatagacaagtaccccagaagggtgaggctgcctgctcgtgaatacctgcttgtgacaagggtcacactcatggatgccgaggtcaacaactacagagttggtgccagaatggtcactgagtatgatcttccagtgaatggcgaattgtctgagggaggtgattgtccctgggcagttctggttgagagtggacagtgcgatttgatgctgatatcatacatgggaattgatttccagaaccaaggtgacagagtttaccgtctgctcaacaccacgttgacattctatggggttgcccatgagggagagacccttgagtatgacatcagagtgaccggttttgccaaacgtttggatggtggcatctccatgttcttctttgagtatgactgctatgtcaatgggaggcttctcattgagatgagagatggctgtgctggcttcttcacaaatgaggagcttgatgcgggaaagggtgtggtgttcacaagaggggatttggctgccagagctaagattccaaagcaagatgtttctccctatgctgtcgctccctgccttcacaaaacaaaactcaacgaaaaggagatgcagaccttggttgacaaagattgggcttccgtttttggctcaaagaatggcatgccggagatcaactacaaactctgcgcacgtaagatgctcatgattgatagagtcaccagcattgaccataagggaggtgtgtacggtttgggtcagttggttggtgagaaaatcttggagagggaccattggtacttcccatgccattttgttaaggatcaagtcatggctggatctcttgtcagcgacggttgttcacaaatgctcaagatgtacatgatctggctcggtttgcaccttaccaccggaccatttgacttcagacccgtcaacggacacccgaacaaagttaggtgtaggggtcagatatctcctcataagggaaagttggtctacgtcatggagatcaaagagatgggattcgacgaggataacgatccgtacgccattgctgacgtcaacatcattgacgttgatttcgaaaagggtcaagatttcagccttgatagaatcagcgactacggaaagggggatcttaacaaaaagatcgtcgtggacttcaagggcattgctctcaagatgcagaagagatccacgaacaagaacccctccaaagttcagcccgtttttgctaacggtgcagccactgtgggaccggaagcgtccaaggccagctctggtgccagtgctagtgcttctgctgcccctgcgaagcctgctttctcagcagatgttcttgcgccaaagccagttgcacttcctgaacatatcctcaagggtgacgctctcgctccgaaagaaatgtcctggcatcccatgtcaaaacttcctggcaacccgacgccgttcttctcccctagttcttaccctccgagggcaatttgcttcatccctttccctggcaacccacttgacaacaattgcaaagctggagaaatgcctctgaactggtacaacatgtcagagttcatgtgtggaaaagttagcaactgcttgggaccagagttcgcaagatttgataagtcaaatacgagcagaagccctgcttttgatttggctcttgtgactagagttgttgaagtcacaaacatggaacatggcaagttcctgaatgttgattgcaatcccagcaaaggcacaatggtgggggagtttgactgtcctcaagatgcgtggttctttgatggttcttgcaatgatgggcacatgccttattccatcatcatggaaatcggacttcagacatccggtgttctcaccagtgtgttgaaagcaccactgacgatggacaaagatgacattctctttaggaaccttgatgcaagtgctgaaatggtgaggccagatgtggatgtgagggggaaaaccataaggaatgtgaccaagtgcactggatatgcaatgttgggaaagatggggattcacagattcacgtttgagttgtctgttgatggcgtggttttctacaaaggaagcacttcctttggatggttcactccagaggtgtttgctcagcaagctggacttgacaatgggaaaaagacggagccttggtgcaaaactaacaacacgagtgtgagaagagttgaaatcgcatcagccaaaggcaaagaacagctgactgagaaacttccagatgcaactaatgctcaagttctcagaaggtcagaacagtgtgagtatttggattacctcaacattgctcctgattctgggctgcatgggaaaggatatgcgcatggacacaaagatgttaacccacaagactggttcttctcttgtcacttttggtttgatcctgtgatgcctggatctttgggaattgagtcaatgttccagctcattgaggcatttgcggtggaccagaacataccgggagaatacaatgtgagcaatccgacctttgcccatgcccctggaaaaacggcgtggaagtaccgtggtcaattgacaccaaagaaccgtgcgatggactgtgaggtgcacatagtttcaatcacagcctctcctgaaaatggaggctacgttgacatagtggcagatggagcactttgggttgatggtctccgtgtgtatgaagccaaagaactcagagttcgtgttgtcagtgcaaaacctcaagccattccggatgttcaacaacagccacccagcgcaaaagcggaccctgggaaaactggagttgcactcagtccgactcagttgagagatgtcctgcttgaagtggacaatccattgtatcttggtgttgaaaactccaatttggtgcagtttgaatccaaacctgcaacttcttcaaggattgtcagtatcaaaccatgctccataagtgatcttggtgacaagtccttcatggaaacgtacaatgtgtcagcacctctgtacactggagcaatggccaagggaattgcgtctgcggaccttgtcattgctgctgggaagaggaagatattgggttcttttggagcgggtgggcttccaatgcaccatgtgagggcagctttggagaagatacaagcggctctgcctcaaggaccatatgctgtgaacctcattcattcaccttttgacagcaacttggaaaaggggaatgttgatctcttcctcgaaaagggcgttactgtggtggaggcttctgcattcatgaccctcactccccaagttgttcgttaccgtgcagccggactctcaaggaacgctgatgggagtgtcaacatcagaaaccgtatcattggaaaagtgtccagaacagaactcgccgaaatgttcatcagaccggctccggaacacctccttgagaaactcatagcttctggtgagataacacaagaacaagccgaacttgcccgtcgtgttcctgtcgcagacgacatcgctgttgaagctgattctggtggtcacactgacaaccgtcccatccacgtcatcttgcctttgatcatcaaccttaggaacagactgcacagagagtgtggttatcctgcgcaccttagagtcagagttggagctggaggcggtgttggctgcccacaagctgctgcggctgccctcacaatgggagctgccttcatagtgactgggactgtcaatcaagttgctaaacagtccgggacatgtgacaacgtgagaaaacaactcagtcaagccacctacagtgacatttgcatggctccagcagctgatatgtttgaggaaggtgtgaaactccaagttctcaagaagggaacaatgttcccatcaagagctaacaaattgtacgaactcttttgcaagtacgactctttcgattcaatgcctcctgctgaacttgaaaggatcgagaagaggatcttcaagagggcacttcaagaggtctgggaagagaccaaggacttttacatcaatggtttgaagaatccagagaagatacagagagcggaacatgaccccaaactcaagatgtctttgtgtttcagatggtatcttggtcttgcatcacgttgggccaacatgggtgctcctgatcgtgtcatggactatcaagtctggtgtggtccagccattggagccttcaatgacttcatcaaaggaacatatcttgatcctgctgtctctaatgagtacccatgtgttgtccagatcaaccttcagattttgcgtggtgcatgttacctgaggcgtcttaatgctctgagaaatgatccgaggattgatcttgagactgaagatgctgcctttgtctatgagccaacgaatgcgctttgagtagttagcttaatcacttaggtcaccagtatgaactaaaatgcatgtaggtgtaagagctcatggagagcatggaatattgtatccgaccatgtaacagtataataactgagctccatctcacttcttctatgaataaacaaaggatgttatgatatattaacactctatctatgcaccttattgttctatgataaatttcctcttattattataaatcatctgaatcgtgacggcttatggaatgcttcaaatagtacaaaaacaaatgtgtactataagactttctaaacaattctaactttagcattgtgaacgagacataagtgttaagaagacataacaattataatggaagaagtttgtctccatttatatattatatattacccacttatgtattatattaggatgttaaggagacataacaattataaagagagaagtttgtatccatttatatattatatactacccatttatatattatacttatccacttatttaatgtctttataaggtttgatccatgatatttctaatattttagttgatatgtatatgaaaaggtactatttgaactctcttactctgtataaaggttggatcatccttaaagtgggtctatttaattttattgcttcttacagataaaaaaaaaattatgagttggtttgataaaatattgaaggatttaaaataataataaataataaataacatataatatatgtatataaatttattataatataacatttatctataaaaaagtaaatattgtcataaatctatacaatcgtttagccttgctggaacgaatctcaattatttaaacgagagtaaacatatttgactttttggttatttaacaaattattatttaacactatatgaaattttttttttttatcagcaaagaataaaattaaattaagaaggacaatggtgtcccaatccttatacaaccaacttccacaagaaagtcaagtcagagacaacaaaaaaacaagcaaaggaaattttttaatttgagttgtcttgtttgctgcataatttatgcagtaaaacactacacataacccttttagcagtagagcaatggttgaccgtgtgcttagcttcttttattttatttttttatcagcaaagaataaataaaataaaatgagacacttcagggatgtttcaacccttatacaaaaccccaaaaacaagtttcctagcaccctaccaacgaattcgcggccgcttaattaatcacgagtggatgactgtcacgactgactcatgactgactactagtgctagcctcgaggtcgacacaactttgtataataaagttgtctagacctaggagctgtgctgggtaactcacatgagtcactggtcacatcagcggccgcctcccagtatcattatagtgaaagttttggctctctcgccggtggttttttacctctatttaaaggggttttccacctaaaaattctggtatcattctcactttacttgttactttaatttctcataatctttggttgaaattatcacgcttccgcacacgatatccctacaaatttattatttgttaaacattttcaaaccgcataaaattttatgaagtcccgtctatctttaatgtagtctaacattttcatattgaaatatataatttacttaattttagcgttggtagaaagcataatgatttattcttattcttcttcatataaatgtttaatatacaatataaacaaattctttaccttaagaaggatttcccattttatattttaaaaatatatttatcaaatatttttcaaccacgtaaatctcataataataagttgtttcaaaagtaataaaatttaactccataatttttttattcgactgatcttaaagcaacacccagtgacacaactagccatttttttctttgaataaaaaaatccaattatcattgtattttttttatacaatgaaaatttcaccaaacaatgatttgtggtatttctgaagcaagtcatgttatgcaaaattctataattcccatttgacactacggaagtaactgaagatctgcttttacatgcgagacacatcttctaaagtaattttaataatagttactatattcaagatttcatatatcaaatactcaatattacttctaaaaaattaattagatataattaaaatattacttttttaattttaagtttaattgttgaatttgtgactattgatttattattctactatgtttaaattgttttatagatagtttaaagtaaatataagtaatgtagtagagtgttagagtgttaccctaaaccataaactataagatttatggtggactaattttcatatatttcttattgcttttaccttttcttggtatgtaagtccgtaactggaattactgtgggttgccatgacactctgtggtcttttggttcatgcatggatcttgcgcaagaaaaagacaaagaacaaagaaaaaagacaaaacagagagacaaaacgcaatcacacaaccaactcaaattagtcactggctgatcaagatcgccgcgtccatgtatgtctaaatgccatgcaaagcaacacgtgcttaacatgcactttaaatggctcacccatctcaacccacacacaaacacattgcctttttcttcatcatcaccacaaccacctgtatatattcattctcttccgccacctcaatttcttcacttcaacacacgtcaacctgcatatgcgtgtcatcccatgcccaaatctccatgcatgttccaaccaccttctctcttatataatacctataaatacctctaatatcactcacttctttcatcatccatccatccagagtactactactctactactataataccccaacccaactcatattcaatactactctaggatccacaaccaaaaatggcttcctctatgctctcttccgctactatggttgcctctccggctcaggccactatggtcgctcctttcaacggacttaagtcctccgctgccttcccagccacccgcaaggctaacaacgacattacttccatcacaagcaacggcggaagagttaactgcatgcaggtgtggcctccgattggaaagaagaagtttgagactctctcttaccttcctgaccttaccgattccgaacttcagcacacttggcttccgaagcctcccaatctgaccctcttgtcagatgaggttcatctctggaggattcctcttgaccagcctgagtcacaacttcaagaccttgctgccaccctgagcagtgatgaattggcgagggcaaacagattctactttccagaacacagaaggcgtttcactgctgggagaggcatcctcagatccatcttgggtggatacttgggagtggaaccgggtcaagtcaagtttgattatgagtcccgtgggaaaccgatccttggtgacagatttgctgagagtggactcctgttcaacttgtctcacagccagaaccttgccttgtgtgctgtcaactacacgcgtcaaataggcattgatcttgaatatctgcgtccaacatctgacttggagtctcttgcaaagaggttctttctcccaagagaatatgaactcttgaggtcactccctgatgagcagaaacagaagattttctttcgttactggacttgcaaagaggcttatctcaaagcaacgggagatggaatagccaaacttgaagagatcgagatagcactcaccccaacagaacctgccaagctccaaacagctcctgcgtggtctctgttggagcttgtgccagatgacaattgtgttgcagctgtggctgttgcgggttttggttggcagcccaagttctggcattactgagtagttagcttaatcacttaggtcaccagtatgaactaaaatgcatgtaggtgtaagagctcatggagagcatggaatattgtatccgaccatgtaacagtataataactgagctccatctcacttcttctatgaataaacaaaggatgttatgatatattaacactctatctatgcaccttattgttctatgataaatttcctcttattattataaatcatctgaatcgtgacggcttatggaatgcttcaaatagtacaaaaacaaatgtgtactataagactttctaaacaattctaactttagcattgtgaacgagacataagtgttaagaagacataacaattataatggaagaagtttgtctccatttatatattatatattacccacttatgtattatattaggatgttaaggagacataacaattataaagagagaagtttgtatccatttatatattatatactacccatttatatattatacttatccacttatttaatgtctttataaggtttgatccatgatatttctaatattttagttgatatgtatatgaaaaggtactatttgaactctcttactctgtataaaggttggatcatccttaaagtgggtctatttaattttattgcttcttacagataaaaaaaaaattatgagttggtttgataaaatattgaaggatttaaaataataataaataataaataacatataatatatgtatataaatttattataatataacatttatctataaaaaagtaaatattgtcataaatctatacaatcgtttagccttgctggaacgaatctcaattatttaaacgagagtaaacatatttgactttttggttatttaacaaattattatttaacactatatgaaattttttttttttatcagcaaagaataaaattaaattaagaaggacaatggtgtcccaatccttatacaaccaacttccacaagaaagtcaagtcagagacaacaaaaaaacaagcaaaggaaattttttaatttgagttgtcttgtttgctgcataatttatgcagtaaaacactacacataacccttttagcagtagagcaatggttgaccgtgtgcttagcttcttttattttatttttttatcagcaaagaataaataaaataaaatgagacacttcagggatgtttcaacccttatacaaaaccccaaaaacaagtttcctagcaccctaccaacgaattcgcggccgcttaattaactactgtcactgaggccgtagacgagtacggactgatctaactagtgctagcctcgaggtcgacacccagctttcttgtacaaagtggttgcggccgcttaattaaatttaaattcaattaatgcaatcttgattttcaacaacgaaggtaatggcgtaaaagaaaaaatgtatgttattgtattgatctttcatgatgttgaagcgtgccataatatgatgatgtataattaaaatattaactgtcgcattttattgaaatggcactgttatttcaaccatatctttgattctgttacatgacacgactgcaagaagtaaataatagacgccgttgttaaagaattgctatcatatgtgcctaactagagggaatttgagcgtcagacctaatcaaatattacaaaatatctcactctgtcgccagcaatggtgtaatcagcgcagacaaatggcgtaaagatcgcggaaaaacctccccgagtggcatgatagctgcctctgtattgctgatttagtcagccttatttgacttaagggtgccctcgttagtgacaaattgctttcaaggagacagccatgccccacactttgttgaaaaacaaattgcctttggggagacggtaaagccagttgctcttcaataaggaatgtcgaggaggcaatgtaaccgcctctggtagtacacttctctaatccaaaaatcaatttgtattcaagataccgcaaaaaacttatggtttaaaccctgcaggactagtccagaaggtaattatccaagatgtagcatcaagaatccaatgtttacgggaaaaactatggaagtattatgtaagctcagcaagaagcagatcaatatgcggcacatatgcaacctatgttcaaaaatgaagaatgtacagatacaagatcctatactgccagaatacgaagaagaatacgtagaaattgaaaaagaagaaccaggcgaagaaaagaatcttgaagacgtaagcactgacgacaacaatgaaaagaagaagataaggtcggtgattgtgaaagagacatagaggacacatgtaaggtggaaaatgtaagggcggaaagtaaccttatcacaaaggaatcttatcccccactacttatccttttatatttttccgtgtcatttttgcccttgagttttcctatataaggaaccaagttcggcatttgtgaaaacaagaaaaaatttggtgtaagctattttctttgaagtactgaggatacaacttcagagaaatttgtaagtttgtaggtaccagatctggatcccaaaccatgtctccggagaggagaccagttgagattaggccagctacagcagctgatatggccgcggtttgtgatatcgttaaccattacattgagacgtctacagtgaactttaggacagagccacaaacaccacaagagtggattgatgatctagagaggttgcaagatagatacccttggttggttgctgaggttgagggtgttgtggctggtattgcttacgctgggccctggaaggctaggaacgcttacgattggacagttgagagtactgtttacgtgtcacataggcatcaaaggttgggcctaggatctacattgtacacacatttgcttaagtctatggaggcgcaaggttttaagtctgtggttgctgttataggccttccaaacgatccatctgttaggttgcatgaggctttgggatacacagcccggggtacattgcgcgcagctggatacaagcatggtggatggcatgatgttggtttttggcaaagggattttgagttgccagctcctccaaggccagttaggccagttacccaaatctgagtagttagcttaatcacctagagctcgatcggcggcaatagcttcttagcgccatcccgggttgatcctatctgtgttgaaatagttgcggtgggcaaggctctctttcagaaagacaggcggccaaaggaacccaaggtgaggtgggctatggctctcagttccttgtggaagcgcttggtctaaggtgcagaggtgttagcgggatgaagcaaaagtgtccgattgtaacaagatatgttgatcctacgtaaggatattaaagtatgtattcatcactaatataatcagtgtattccaatatgtactacgatttccaatgtctttattgtcgccgtatgtaatcggcgtcacaaaataatccccggtgactttcttttaatccaggatgaaataatatgttattataatttttgcgatttggtccgttataggaattgaagtgtgcttgaggtcggtcgccaccactcccatttcataattttacatgtatttgaaaaataaaaatttatggtattcaatttaaacacgtatacttgtaaagaatgatatcttgaaagaaatatagtttaaatatttattgataaaataacaagtcaggtattatagtccaagcaaaaacataaatttattgatgcaagtttaaattcagaaatatttcaataactgattatatcagctggtacattgccgtagatgaaagactgagtgcgatattatggtgtaatacataggaattcgtttaaacgatctgcgtctaattttcggtccaacttgcacaggaaagacgtcgaccgcggtagctcttgcccagcagactgggcttccagtcctttcgctcgatcgggtccaatgttgtcctcagctgtgaaccggaagcggacgaccaacagtggaagaactgaaaggaacgagccgtctataccttgatgatcggcctctggtgaagggtatcatcgcagccaagcaagctcatgaaaggctgatgggggaggtgtataattatgaggcccacggcgggcttattctttagggaggatctatctcgttgctcaagtgcatggcgcaaagcagttattggagtgcggattttcgttggcatattattcgccacgagttagcagacgaagagaccttcatgaacgtggccaaggccagagttaagcagatgttacgccctgctgcaggcctttctattatccaatagttggttgatctttggaaagagcctcggctgaggcccatactgaaagagatcgatggatatcgatatgccatgttgtttgctagccagaaccagatcacatccgatatgctattgcagcttgacgcagatatggaggataagttgattcatgggatcgctcaggagtagctcatccatgcacgccgacaagaacagaaattccgtcgagttaacgcagccgcttacgacggattcgaaggtcatccattcggaatgtattagtttgcaccagctccgcgtcacacctgtcttcatttgaataagatgttagcaattgtttttagctttgtcttgttgtggcagggcggcaagtgcttcagacatcattctgttttcaaattttatgctggagaacagcttcttaattcctttggaaataatagactgcgtcttaaaattcagatgtctggatatagatatgattgtaaaataacctatttaagtgtcatttagaacataagttttatgaatgttcttccattttcgtcatcgaacgaataagagtaaatacaccttttttaacattacaaataagttcttatacgttgtttatacaccgggaatcatttccattattttcgcgcaaaagtcacggatattcgtgaaagcgacataaactgcgaaatttgcggggagtgtcttgagtttgcctcgaggctagcgcatgcacatagacacacacatcatctcattgatgcttggtaataattgtcattagattgtttttatgcatagatgcactcgaaatcagccaattttagacaagtatcaaacggatgtgacttcagtacattaaaaacgtccgcaatgtgttattaagttgtctaagcgtcaatttgatttacaattgaatatatcctgccccagccagccaacagctcgatttacaattgaatatatcctgccggccggcccacgcgtgtcgaggaattctgatctggcccccatttggacgtgaatgtagacacgtcgaaataaagatttccgaattagaataatttgtttattgctttcgcctataaatacgacggatcgtaatttgtcgttttatcaaaatgtactttcattttataataacgctgcggacatctacatttttgaattgaaaaaaaattggtaattactctttctttttctccatattgaccatcatactcattgctgatccatgtagatttcccggacatgaagccatttacaattgaatatatcctgccgccgctgccgctttgcacccggtggagcttgcatgttggtttctacgcagaactgagccggttaggcagataatttccattgagaactgagccatgtgcaccttccccccaacacggtgagcgacggggcaacggagtgatccacatgggacttttaaacatcatccgtcggatggcgttgcgagagaagcagtcgatccgtgagatcagccgacgcaccgggcaggcgcgcaacacgatcgcaaagtatttgaacgcaggtacaatcgagccgacgttcacgcggaacgaccaagcaagcttggctgccatttttggggtgaggccgttcgcggccgaggggcgcagcccctggggggatgggaggcccgcgttagcgggccgggagggttcgagaagggggggcaccccccttcggcgtgcgcggtcacgcgcacagggcgcagccctggttaaaaacaaggtttataaatattggtttaaaagcaggttaaaagacaggttagcggtggccgaaaaacgggcggaaacccttgcaaatgctggattttctgcctgtggacagcccctcaaatgtcaataggtgcgcccctcatctgtcagcactctgcccctcaagtgtcaaggatcgcgcccctcatctgtcagtagtcgcgcccctcaagtgtcaataccgcagggcacttatccccaggcttgtccacatcatctgtgggaaactcgcgtaaaatcaggcgttttcgccgatttgcgaggctggccagctccacgtcgccggccgaaatcgagcctgcccctcatctgtcaacgccgcgccgggtgagtcggcccctcaagtgtcaacgtccgcccctcatctgtcagtgagggccaagttttccgcgaggtatccacaacgccggcggccgcggtgtctcgcacacggcttcgacggcgtttctggcgcgtttgcagggccatagacggccgccagcccagcggcgagggcaaccagcccggtgagcgtcggaaagggtcgacggatcttttccgctgcataaccctgcttcggggtcattatagcgattttttcggtatatccatcctttttcgcacgatatacaggattttgccaaagggttcgtgtagactttccttggtgtatccaacggcgtcagccgggcaggataggtgaagtaggcccacccgcgagcgggtgttccttcttcactgtcccttattcgcacctggcggtgctcaacgggaatcctgctctgcgaggctggccggctaccgccggcgtaacagatgagggcaagcggatggctgatgaaaccaagccaaccaggaagggcagcccacctatcaaggtgtactgccttccagacgaacgaagagcgattgaggaaaaggcggcggcggccggcatgagcctgtcggcctacctgctggccgtcggccagggctacaaaatcacgggcgtcgtggactatgagcacgtccgcgagctggcccgcatcaatggcgacctgggccgcctgggcggcctgctgaaactctggctcaccgacgacccgcgcacggcgcggttcggtgatgccacgatcctcgccctgctggcgaagatcgaagagaagcaggacgagcttggcaaggtcatgatgggcgtggtccgcccgagggcagagccatgacttttttagccgctaaaacggccggggggtgcgcgtgattgccaagcacgtccccatgcgctccatcaagaagagcgacttcgcggagctggtattcgtgcagggcaagattcggaataccaagtacgagaaggacggccagacggtctacgggaccgacttcattgccgataaggtggattatctggacaccaaggcaccaggcgggtcaaatcaggaataagggcacattgccccggcgtgagtcggggcaatcccgcaaggagggtgaatgaatcggacgtttgaccggaaggcatacaggcaagaactgatcgacgcggggttttccgccgaggatgccgaaaccatcgcaagccgcaccgtcatgcgtgcgccccgcgaaaccttccagtccgtcggctcgatggtccagcaagctacggccaagatcgagcgcgacagcgtgcaactggctccccctgccctgcccgcgccatcggccgccgtggagcgttcgcgtcgtctcgaacaggaggcggcaggtttggcgaagtcgatgaccatcgacacgcgaggaactatgacgaccaagaagcgaaaaaccgccggcgaggacctggcaaaacaggtcagcgaggccaagcaggccgcgttgctgaaacacacgaagcagcagatcaaggaaatgcagctttccttgttcgatattgcgccgtggccggacacgatgcgagcgatgccaaacgacacggcccgctctgccctgttcaccacgcgcaacaagaaaatcccgcgcgaggcgctgcaaaacaaggtcattttccacgtcaacaaggacgtgaagatcacctacaccggcgtcgagctgcgggccgacgatgacgaactggtgtggcagcaggtgttggagtacgcgaagcgcacccctatcggcgagccgatcaccttcacgttctacgagctttgccaggacctgggctggtcgatcaatggccggtattacacgaaggccgaggaatgcctgtcgcgcctacaggcgacggcgatgggcttcacgtccgaccgcgttgggcacctggaatcggtgtcgctgctgcaccgcttccgcgtcctggaccgtggcaagaaaacgtcccgttgccaggtcctgatcgacgaggaaatcgtcgtgctgtttgctggcgaccactacacgaaattcatatgggagaagtaccgcaagctgtcgccgacggcccgacggatgttcgactatttcagctcgcaccgggagccgtacccgctcaagctggaaaccttccgcctcatgtgcggatcggattccacccgcgtgaagaagtggcgcgagcaggtcggcgaagcctgcgaagagttgcgaggcagcggcctggtggaacacgcctgggtcaatgatgacctggtgcattgcaaacgctagggccttgtggggtcagttccggctgggggttcagcagccagcgctttactggcatttcaggaacaagcgggcactgctcgacgcacttgcttcgctcagtatcgctcgggacgcacggcgcgctctacgaactgccgataaacagaggattaaaattgacaattgtgattaaggctcagattcgacggcttggagcggccgacgtgcaggatttccgcgagatccgattgtcggccctgaagaaagctccagagatgttcgggtccgtttacgagcacgaggagaaaaagcccatggaggcgttcgctgaacggttgcgagatgccgtggcattcggcgcctacatcgacggcgagatcattgggctgtcggtcttcaaacaggaggacggccccaaggacgctcacaaggcgcatctgtccggcgttttcgtggagcccgaacagcgaggccgaggggtcgccggtatgctgctgcgggcgttgccggcgggtttattgctcgtgatgatcgtccgacagattccaacgggaatctggtggatgcgcatcttcatcctcggcgcacttaatatttcgctattctggagcttgttgtttatttcggtctaccgcctgccgggcggggtcgcggcgacggtaggcgctgtgcagccgctgatggtcgtgttcatctctgccgctctgctaggtagcccgatacgattgatggcggtcctgggggctatttgcggaactgcgggcgtggcgctgttggtgttgacaccaaacgcagcgctagatcctgtcggcgtcgcagcgggcctggcgggggcggtttccatggcgttcggaaccgtgctgacccgcaagtggcaacctcccgtgcctctgctcacctttaccgcctggcaactggcggccggaggacttctgctcgttccagtagctttagtgtttgatccgccaatcccgatgcctacaggaaccaatgttctcggcctggcgtggctcggcctgatcggagcgggtttaacctacttcctttggttccgggggatctcgcgactcgaacctacagttgtttccttactgggctttctcagcccccgagcgcttagtgggaatttgtaccccttatcgaaccgggagcacaggatgacgcctaacaattcattcaagccgacaccgcttcgcggcgcggcttaattcaggagttaaacatcatgagggaagcggtgatcgccgaagtatcgactcaactatcagaggtagttggcgtcatcgagcgccatctcgaaccgacgttgctggccgtacatttgtacggctccgcagtggatggcggcctgaagccacacagtgatattgatttgctggttacggtgaccgtaaggcttgatgaaacaacgcggcgagctttgatcaacgaccttttggaaacttcggcttcccctggagagagcgagattctccgcgctgtagaagtcaccattgttgtgcacgacgacatcattccgtggcgttatccagctaagcgcgaactgcaatttggagaatggcagcgcaatgacattcttgcaggtatcttcgagccagccacgatcgacattgatctggctatcttgctgacaaaagcaagagaacatagcgttgccttggtaggtccagcggcggaggaactctttgatccggttcctgaacaggatctatttgaggcgctaaatgaaaccttaacgctatggaactcgccgcccgactgggctggcgatgagcgaaatgtagtgcttacgttgtcccgcatttggtacagcgcagtaaccggcaaaatcgcgccgaaggatgtcgctgccgactgggcaatggagcgcctgccggcccagtatcagcccgtcatacttgaagctaggcaggcttatcttggacaagaagatcgcttggcctcgcgcgcagatcagttggaagaatttgttcactacgtgaaaggcgagatcaccaaggtagtcggcaaataatgtctaacaattcgttcaagccgacgccgcttcgcggcgcggcttaactcaagcgttagagagctggggaagactatgcgcgatctgttgaaggtggttctaagcctcgtcttgcgatggcatttcgatccattcccattccgcgctcaagatggcttcccctcggcagttcatcagggctaaatcaatctagccgacttgtccggtgaaatgggctgcactccaacagaaacaatcaaacaaacatacacagcgacttattcacacgagctcaaattacaacggtatatatcctgccagtcagcatcatcacaccaaaagttaggcccgaatagtttgaaattagaaagctcgcaattgaggtctacaggccaaattcgctcttagccgtacaatattactcaccggatcctaaccggtttaattaaggcgcgccatgcccgggcaagcggccgcacaagttt

SEQ ID NO: 49 - DNA, 40406 bp, Artificial sequence
  plasmid pDAB9396
cttgtacaaagtggttgcggccgcttaattaaatttaaattcaattaatgcaatcttgattttcaacaacgaaggtaatggcgtaaaagaaaaaatgtatgttattgtattgatctttcatgatgttgaagcgtgccataatatgatgatgtataattaaaatattaactgtcgcattttattgaaatggcactgttatttcaaccatatctttgattctgttacatgacacgactgcaagaagtaaataatagacgccgttgttaaagaattgctatcatatgtgcctaactagagggaatttgagcgtcagacctaatcaaatattacaaaatatctcactctgtcgccagcaatggtgtaatcagcgcagacaaatggcgtaaagatcgcggaaaaacctccccgagtggcatgatagctgcctctgtattgctgatttagtcagccttatttgacttaagggtgccctcgttagtgacaaattgctttcaaggagacagccatgccccacactttgttgaaaaacaaattgcctttggggagacggtaaagccagttgctcttcaataaggaatgtcgaggaggcaatgtaaccgcctctggtagtacacttctctaatccaaaaatcaatttgtattcaagataccgcaaaaaacttatggtttaaaccctgcaggactagtccagaaggtaattatccaagatgtagcatcaagaatccaatgtttacgggaaaaactatggaagtattatgtaagctcagcaagaagcagatcaatatgcggcacatatgcaacctatgttcaaaaatgaagaatgtacagatacaagatcctatactgccagaatacgaagaagaatacgtagaaattgaaaaagaagaaccaggcgaagaaaagaatcttgaagacgtaagcactgacgacaacaatgaaaagaagaagataaggtcggtgattgtgaaagagacatagaggacacatgtaaggtggaaaatgtaagggcggaaagtaaccttatcacaaaggaatcttatcccccactacttatccttttatatttttccgtgtcatttttgcccttgagttttcctatataaggaaccaagttcggcatttgtgaaaacaagaaaaaatttggtgtaagctattttctttgaagtactgaggatacaacttcagagaaatttgtaagtttgtaggtaccagatctggatcccaaaccatgtctccggagaggagaccagttgagattaggccagctacagcagctgatatggccgcggtttgtgatatcgttaaccattacattgagacgtctacagtgaactttaggacagagccacaaacaccacaagagtggattgatgatctagagaggttgcaagatagatacccttggttggttgctgaggttgagggtgttgtggctggtattgcttacgctgggccctggaaggctaggaacgcttacgattggacagttgagagtactgtttacgtgtcacataggcatcaaaggttgggcctaggatctacattgtacacacatttgcttaagtctatggaggcgcaaggttttaagtctgtggttgctgttataggccttccaaacgatccatctgttaggttgcatgaggctttgggatacacagcccggggtacattgcgcgcagctggatacaagcatggtggatggcatgatgttggtttttggcaaagggattttgagttgccagctcctccaaggccagttaggccagttacccaaatctgagtagttagcttaatcacctagagctcgatcggcggcaatagcttcttagcgccatcccgggttgatcctatctgtgttgaaatagttgcggtgggcaaggctctctttcagaaagacaggcggccaaaggaacccaaggtgaggtgggctatggctctcagttccttgtggaagcgcttggtctaaggtgcagaggtgttagcgggatgaagcaaaagtgtccgattgtaacaagatatgttgatcctacgtaaggatattaaagtatgtattcatcactaatataatcagtgtattccaatatgtactacgatttccaatgtctttattgtcgccgtatgtaatcggcgtcacaaaataatccccggtgactttcttttaatccaggatgaaataatatgttattataatttttgcgatttggtccgttataggaattgaagtgtgcttgaggtcggtcgccaccactcccatttcataattttacatgtatttgaaaaataaaaatttatggtattcaatttaaacacgtatacttgtaaagaatgatatcttgaaagaaatatagtttaaatatttattgataaaataacaagtcaggtattatagtccaagcaaaaacataaatttattgatgcaagtttaaattcagaaatatttcaataactgattatatcagctggtacattgccgtagatgaaagactgagtgcgatattatggtgtaatacataggaattcgtttaaacgatctgcgtctaattttcggtccaacttgcacaggaaagacgtcgaccgcggtagctcttgcccagcagactgggcttccagtcctttcgctcgatcgggtccaatgttgtcctcagctgtgaaccggaagcggacgaccaacagtggaagaactgaaaggaacgagccgtctataccttgatgatcggcctctggtgaagggtatcatcgcagccaagcaagctcatgaaaggctgatgggggaggtgtataattatgaggcccacggcgggcttattctttagggaggatctatctcgttgctcaagtgcatggcgcaaagcagttattggagtgcggattttcgttggcatattattcgccacgagttagcagacgaagagaccttcatgaacgtggccaaggccagagttaagcagatgttacgccctgctgcaggcctttctattatccaatagttggttgatctttggaaagagcctcggctgaggcccatactgaaagagatcgatggatatcgatatgccatgttgtttgctagccagaaccagatcacatccgatatgctattgcagcttgacgcagatatggaggataagttgattcatgggatcgctcaggagtagctcatccatgcacgccgacaagaacagaaattccgtcgagttaacgcagccgcttacgacggattcgaaggtcatccattcggaatgtattagtttgcaccagctccgcgtcacacctgtcttcatttgaataagatgttagcaattgtttttagctttgtcttgttgtggcagggcggcaagtgcttcagacatcattctgttttcaaattttatgctggagaacagcttcttaattcctttggaaataatagactgcgtcttaaaattcagatgtctggatatagatatgattgtaaaataacctatttaagtgtcatttagaacataagttttatgaatgttcttccattttcgtcatcgaacgaataagagtaaatacaccttttttaacattacaaataagttcttatacgttgtttatacaccgggaatcatttccattattttcgcgcaaaagtcacggatattcgtgaaagcgacataaactgcgaaatttgcggggagtgtcttgagtttgcctcgaggctagcgcatgcacatagacacacacatcatctcattgatgcttggtaataattgtcattagattgtttttatgcatagatgcactcgaaatcagccaattttagacaagtatcaaacggatgtgacttcagtacattaaaaacgtccgcaatgtgttattaagttgtctaagcgtcaatttgatttacaattgaatatatcctgccccagccagccaacagctcgatttacaattgaatatatcctgccggccggcccacgcgtgtcgaggaattctgatctggcccccatttggacgtgaatgtagacacgtcgaaataaagatttccgaattagaataatttgtttattgctttcgcctataaatacgacggatcgtaatttgtcgttttatcaaaatgtactttcattttataataacgctgcggacatctacatttttgaattgaaaaaaaattggtaattactctttctttttctccatattgaccatcatactcattgctgatccatgtagatttcccggacatgaagccatttacaattgaatatatcctgccgccgctgccgctttgcacccggtggagcttgcatgttggtttctacgcagaactgagccggttaggcagataatttccattgagaactgagccatgtgcaccttccccccaacacggtgagcgacggggcaacggagtgatccacatgggacttttaaacatcatccgtcggatggcgttgcgagagaagcagtcgatccgtgagatcagccgacgcaccgggcaggcgcgcaacacgatcgcaaagtatttgaacgcaggtacaatcgagccgacgttcacgcggaacgaccaagcaagcttggctgccatttttggggtgaggccgttcgcggccgaggggcgcagcccctggggggatgggaggcccgcgttagcgggccgggagggttcgagaagggggggcaccccccttcggcgtgcgcggtcacgcgcacagggcgcagccctggttaaaaacaaggtttataaatattggtttaaaagcaggttaaaagacaggttagcggtggccgaaaaacgggcggaaacccttgcaaatgctggattttctgcctgtggacagcccctcaaatgtcaataggtgcgcccctcatctgtcagcactctgcccctcaagtgtcaaggatcgcgcccctcatctgtcagtagtcgcgcccctcaagtgtcaataccgcagggcacttatccccaggcttgtccacatcatctgtgggaaactcgcgtaaaatcaggcgttttcgccgatttgcgaggctggccagctccacgtcgccggccgaaatcgagcctgcccctcatctgtcaacgccgcgccgggtgagtcggcccctcaagtgtcaacgtccgcccctcatctgtcagtgagggccaagttttccgcgaggtatccacaacgccggcggccgcggtgtctcgcacacggcttcgacggcgtttctggcgcgtttgcagggccatagacggccgccagcccagcggcgagggcaaccagcccggtgagcgtcggaaagggtcgacggatcttttccgctgcataaccctgcttcggggtcattatagcgattttttcggtatatccatcctttttcgcacgatatacaggattttgccaaagggttcgtgtagactttccttggtgtatccaacggcgtcagccgggcaggataggtgaagtaggcccacccgcgagcgggtgttccttcttcactgtcccttattcgcacctggcggtgctcaacgggaatcctgctctgcgaggctggccggctaccgccggcgtaacagatgagggcaagcggatggctgatgaaaccaagccaaccaggaagggcagcccacctatcaaggtgtactgccttccagacgaacgaagagcgattgaggaaaaggcggcggcggccggcatgagcctgtcggcctacctgctggccgtcggccagggctacaaaatcacgggcgtcgtggactatgagcacgtccgcgagctggcccgcatcaatggcgacctgggccgcctgggcggcctgctgaaactctggctcaccgacgacccgcgcacggcgcggttcggtgatgccacgatcctcgccctgctggcgaagatcgaagagaagcaggacgagcttggcaaggtcatgatgggcgtggtccgcccgagggcagagccatgacttttttagccgctaaaacggccggggggtgcgcgtgattgccaagcacgtccccatgcgctccatcaagaagagcgacttcgcggagctggtattcgtgcagggcaagattcggaataccaagtacgagaaggacggccagacggtctacgggaccgacttcattgccgataaggtggattatctggacaccaaggcaccaggcgggtcaaatcaggaataagggcacattgccccggcgtgagtcggggcaatcccgcaaggagggtgaatgaatcggacgtttgaccggaaggcatacaggcaagaactgatcgacgcggggttttccgccgaggatgccgaaaccatcgcaagccgcaccgtcatgcgtgcgccccgcgaaaccttccagtccgtcggctcgatggtccagcaagctacggccaagatcgagcgcgacagcgtgcaactggctccccctgccctgcccgcgccatcggccgccgtggagcgttcgcgtcgtctcgaacaggaggcggcaggtttggcgaagtcgatgaccatcgacacgcgaggaactatgacgaccaagaagcgaaaaaccgccggcgaggacctggcaaaacaggtcagcgaggccaagcaggccgcgttgctgaaacacacgaagcagcagatcaaggaaatgcagctttccttgttcgatattgcgccgtggccggacacgatgcgagcgatgccaaacgacacggcccgctctgccctgttcaccacgcgcaacaagaaaatcccgcgcgaggcgctgcaaaacaaggtcattttccacgtcaacaaggacgtgaagatcacctacaccggcgtcgagctgcgggccgacgatgacgaactggtgtggcagcaggtgttggagtacgcgaagcgcacccctatcggcgagccgatcaccttcacgttctacgagctttgccaggacctgggctggtcgatcaatggccggtattacacgaaggccgaggaatgcctgtcgcgcctacaggcgacggcgatgggcttcacgtccgaccgcgttgggcacctggaatcggtgtcgctgctgcaccgcttccgcgtcctggaccgtggcaagaaaacgtcccgttgccaggtcctgatcgacgaggaaatcgtcgtgctgtttgctggcgaccactacacgaaattcatatgggagaagtaccgcaagctgtcgccgacggcccgacggatgttcgactatttcagctcgcaccgggagccgtacccgctcaagctggaaaccttccgcctcatgtgcggatcggattccacccgcgtgaagaagtggcgcgagcaggtcggcgaagcctgcgaagagttgcgaggcagcggcctggtggaacacgcctgggtcaatgatgacctggtgcattgcaaacgctagggccttgtggggtcagttccggctgggggttcagcagccagcgctttactggcatttcaggaacaagcgggcactgctcgacgcacttgcttcgctcagtatcgctcgggacgcacggcgcgctctacgaactgccgataaacagaggattaaaattgacaattgtgattaaggctcagattcgacggcttggagcggccgacgtgcaggatttccgcgagatccgattgtcggccctgaagaaagctccagagatgttcgggtccgtttacgagcacgaggagaaaaagcccatggaggcgttcgctgaacggttgcgagatgccgtggcattcggcgcctacatcgacggcgagatcattgggctgtcggtcttcaaacaggaggacggccccaaggacgctcacaaggcgcatctgtccggcgttttcgtggagcccgaacagcgaggccgaggggtcgccggtatgctgctgcgggcgttgccggcgggtttattgctcgtgatgatcgtccgacagattccaacgggaatctggtggatgcgcatcttcatcctcggcgcacttaatatttcgctattctggagcttgttgtttatttcggtctaccgcctgccgggcggggtcgcggcgacggtaggcgctgtgcagccgctgatggtcgtgttcatctctgccgctctgctaggtagcccgatacgattgatggcggtcctgggggctatttgcggaactgcgggcgtggcgctgttggtgttgacaccaaacgcagcgctagatcctgtcggcgtcgcagcgggcctggcgggggcggtttccatggcgttcggaaccgtgctgacccgcaagtggcaacctcccgtgcctctgctcacctttaccgcctggcaactggcggccggaggacttctgctcgttccagtagctttagtgtttgatccgccaatcccgatgcctacaggaaccaatgttctcggcctggcgtggctcggcctgatcggagcgggtttaacctacttcctttggttccgggggatctcgcgactcgaacctacagttgtttccttactgggctttctcagcccccgagcgcttagtgggaatttgtaccccttatcgaaccgggagcacaggatgacgcctaacaattcattcaagccgacaccgcttcgcggcgcggcttaattcaggagttaaacatcatgagggaagcggtgatcgccgaagtatcgactcaactatcagaggtagttggcgtcatcgagcgccatctcgaaccgacgttgctggccgtacatttgtacggctccgcagtggatggcggcctgaagccacacagtgatattgatttgctggttacggtgaccgtaaggcttgatgaaacaacgcggcgagctttgatcaacgaccttttggaaacttcggcttcccctggagagagcgagattctccgcgctgtagaagtcaccattgttgtgcacgacgacatcattccgtggcgttatccagctaagcgcgaactgcaatttggagaatggcagcgcaatgacattcttgcaggtatcttcgagccagccacgatcgacattgatctggctatcttgctgacaaaagcaagagaacatagcgttgccttggtaggtccagcggcggaggaactctttgatccggttcctgaacaggatctatttgaggcgctaaatgaaaccttaacgctatggaactcgccgcccgactgggctggcgatgagcgaaatgtagtgcttacgttgtcccgcatttggtacagcgcagtaaccggcaaaatcgcgccgaaggatgtcgctgccgactgggcaatggagcgcctgccggcccagtatcagcccgtcatacttgaagctaggcaggcttatcttggacaagaagatcgcttggcctcgcgcgcagatcagttggaagaatttgttcactacgtgaaaggcgagatcaccaaggtagtcggcaaataatgtctaacaattcgttcaagccgacgccgcttcgcggcgcggcttaactcaagcgttagagagctggggaagactatgcgcgatctgttgaaggtggttctaagcctcgtcttgcgatggcatttcgatccattcccattccgcgctcaagatggcttcccctcggcagttcatcagggctaaatcaatctagccgacttgtccggtgaaatgggctgcactccaacagaaacaatcaaacaaacatacacagcgacttattcacacgagctcaaattacaacggtatatatcctgccagtcagcatcatcacaccaaaagttaggcccgaatagtttgaaattagaaagctcgcaattgaggtctacaggccaaattcgctcttagccgtacaatattactcaccggatcctaaccggtttaattaaggcgcgccatgcccgggcaagcggccgcacaagtttgtacaaaaaagcaggcttctagacctaggtggagtcatcacgcagactatctcagcatgtgcgtagcacgcggccgcctcccagtatcattatagtgaaagttttggctctctcgccggtggttttttacctctatttaaaggggttttccacctaaaaattctggtatcattctcactttacttgttactttaatttctcataatctttggttgaaattatcacgcttccgcacacgatatccctacaaatttattatttgttaaacattttcaaaccgcataaaattttatgaagtcccgtctatctttaatgtagtctaacattttcatattgaaatatataatttacttaattttagcgttggtagaaagcataatgatttattcttattcttcttcatataaatgtttaatatacaatataaacaaattctttaccttaagaaggatttcccattttatattttaaaaatatatttatcaaatatttttcaaccacgtaaatctcataataataagttgtttcaaaagtaataaaatttaactccataatttttttattcgactgatcttaaagcaacacccagtgacacaactagccatttttttctttgaataaaaaaatccaattatcattgtattttttttatacaatgaaaatttcaccaaacaatgatttgtggtatttctgaagcaagtcatgttatgcaaaattctataattcccatttgacactacggaagtaactgaagatctgcttttacatgcgagacacatcttctaaagtaattttaataatagttactatattcaagatttcatatatcaaatactcaatattacttctaaaaaattaattagatataattaaaatattacttttttaattttaagtttaattgttgaatttgtgactattgatttattattctactatgtttaaattgttttatagatagtttaaagtaaatataagtaatgtagtagagtgttagagtgttaccctaaaccataaactataagatttatggtggactaattttcatatatttcttattgcttttaccttttcttggtatgtaagtccgtaactggaattactgtgggttgccatgacactctgtggtcttttggttcatgcatggatcttgcgcaagaaaaagacaaagaacaaagaaaaaagacaaaacagagagacaaaacgcaatcacacaaccaactcaaattagtcactggctgatcaagatcgccgcgtccatgtatgtctaaatgccatgcaaagcaacacgtgcttaacatgcactttaaatggctcacccatctcaacccacacacaaacacattgcctttttcttcatcatcaccacaaccacctgtatatattcattctcttccgccacctcaatttcttcacttcaacacacgtcaacctgcatatgcgtgtcatcccatgcccaaatctccatgcatgttccaaccaccttctctcttatataatacctataaatacctctaatatcactcacttctttcatcatccatccatccagagtactactactctactactataataccccaacccaactcatattcaatactactctaggatccacaaccaaaaatggcagcgaggctgcaagagcagaaaggaggtgagatggacacgaggattgcgatcataggcatgagcgccatacttccttgtggaaccacggtgagagagtcatgggagaccataagggctggcattgattgcctgtctgatcttcctgaggatcgtgttgatgtgactgcgtactttgacccagtcaagaccacaaaggacaaaatctactgcaagagaggaggtttcattcctgagtatgactttgatgcgcgtgagtttggtctcaacatgttccagatggaagattctgatgcgaatcagaccatctcacttctcaaggtcaaagaagcacttcaagatgctgggattgatgcacttggaaaggagaagaaaaacataggatgcgtgcttggcattggaggtggacagaagagttcacatgagttctacagcagactcaactatgtggttgtggagaaagtcttgagaaagatggggatgccagaggaagatgtcaaagtggctgtggagaagtacaaagcgaacttcccagaatggagacttgactctttccctggattccttgggaatgtcactgctggcagatgcaccaacacattcaacttggatggcatgaactgcgttgtggatgctgcatgtgcaagctccttgatagcagtcaaggttgcgattgatgaactgctctatggtgactgcgacatgatggtcactggtgcaacctgcacagacaactccattgggatgtacatggctttctcaaagacacctgtgttcagcacggacccaagtgtgagagcgtatgatgagaaaacgaaagggatgctcattggtgagggatcagccatgttggtgctcaaacgttatgcagatgcagtgagggatggtgatgagattcatgctgtgattcgtggttgtgcaagctcaagtgatggcaaagcagctggcatctacactcccacaatcagtggtcaagaggaagccttgagacgtgcatacaatcgtgcctgcgttgaccctgccactgtcactttggttgagggtcatgggactggcactccagttggagataggattgagttgactgcgttgaggaacttgtttgacaaagcgtatggtgaagggaacacagagaaagttgcagttggaagtatcaagtccagtattggtcatttgaaggctgttgctggtcttgctggaatgatcaaggtcatcatggctctcaaacacaagactttgcctggaacgatcaatgtggacaatccacccaatctctatgacaacactcccatcaatgagtcatccctctacatcaacacgatgaacagaccctggttccctccacctggtgttccgagacgtgctggaatatccagctttggctttggaggtgccaactaccatgcagtgttggaagaggctgaaccagagcacacgacagcgtacagactcaacaaacgtccacaaccggtgttgatgatggctgcaactcctgctgcgttgcagagcctttgtgaagctcagctgaaagagtttgaagctgcgatcaaggagaatgagacagtcaagaatactgcctacatcaagtgtgtcaagtttggagaacagttcaagttccctgggagcatacctgcgaccaatgcgagactgggattcttggtcaaagatgcggaggatgcgtgctccacgcttcgtgctatatgtgctcagtttgccaaagatgtgaccaaagaagcgtggaggcttccgagagaaggagtttctttccgtgccaaaggcattgccaccaatggtgctgttgctgcactcttctctggacaaggtgctcagtacacacacatgttcagtgaagttgcgatgaactggcctcagttcagacagtccattgctgcaatggacgctgcacagtccaaggttgctggaagtgacaaagactttgaaagagtctctcaagtcctgtacccaaggaaaccgtacgaacgtgagccagaacaagatcacaagaaaatctcactcacagcatacagccagccgtcaaccctggcatgtgctcttggtgcctttgagattttcaaggaagctggattcactccagactttgcagctggacacagcttgggtgagtttgctgcgctctatgcagctggttgtgttgacagagatgagttgtttgaacttgtttgcagaagggcaaggatcatgggaggcaaagatgcacctgccacacccaaaggttgcatggcagctgtcataggacccaacgcagagaacatcaaggttcaagctgccaacgtctggcttggaaactcaaactctccgtctcagactgtcattactgggtctgttgaagggattcaagctgaaagtgccagattgcagaaggaagggttcagagttgtgcctcttgcttgtgagtctgccttccattctccacagatggaaaatgccagctcagctttcaaagatgtcatatccaaggtttccttccgtacacccaaagcagaaacaaagctcttcagcaatgtttctggagagacctatccgacggatgccagagagatgctcactcaacacatgacctcatctgtgaagttcctgacccaagtgaggaacatgcaccaagctggtgcgagaatctttgttgagtttggaccgaaacaagttctcagcaaacttgtttctgaaaccctcaaagatgacccgtctgttgtcacagtgtctgtgaacccagcttctggcacggactctgacatacagttgagggatgctgcagttcagctggttgtggctggtgtcaatcttcaagggtttgacaagtgggatgctcctgatgccacgaggatgcaagccatcaagaaaaagagaaccacactcagactttcagctgccacctatgtcagtgacaagaccaagaaagtgagggatgctgccatgaacgacggaagatgtgtcacatacctcaagggtgctgcaccactcatcaaggctcctgaacctgtggttgacgaagctgccaagagggaggctgaaaggcttcagaaggagcttcaagacgctcagaggcagcttgacgacgccaaacgtgcagctgcagaagccaactccaaacttgctgctgccaaggaggaagccaagactgctgcagcttcagccaagcctgcagttgacactgctgttgtggagaaacatcgtgccatcctcaagtccatgctggctgagctggatggttatggaagtgttgatgcttcttcccttcagcaacagcaacagcaacagactgctccggcgcctgttaaagccgctgcccctgccgctcccgttgcaagtgctcctgctcccgccgtgtccaacgagttgcttgagaaagctgagacagttgtgatggaggttctcgctgccaagactggatacgaaacagacatgattgaggcggacatggagcttgagactgagttgggaattgacagcatcaagagggttgaaattctttctgaagtccaagctatgcttaacgttgaggcgaaagatgttgatgctctctctaggacgagaacagtgggtgaagttgtcaacgctatgaaggcagaaatcgctggttcttccgctccggcgccggcagctgccgcacctgcaccggctaaagcggctccagctgcagctgcaccagctgtttctaatgagctgctcgaaaaggcagaaactgttgtgatggaagtccttgctgccaaaactggctacgaaactgacatgatagaatcagacatggagcttgagacggagcttggaattgattccatcaagcgtgtggaaatcctcagtgaagtccaagccatgctcaatgtggaagctaaggatgtggatgctctctcaaggaccagaactgtcggtgaggttgtcaatgccatgaaggctgagatagctggaggctccgctcctgcgccggccgctgccgctcctggtcccgctgccgcggctccagctccagctgcagccgctccggccgtctcaaacgaactccttgaaaaagctgagaccgtcgtgatggaggtcttggcagctaaaaccggctatgagactgacatgattgagtctgacatggaattggagacagaacttgggatagacagcatcaaacgtgttgaaatcctcagtgaggtccaagctatgctgaacgtggaagcgaaggatgttgatgctctgtccagaacgaggaccgttggtgaggttgtggatgccatgaaggctgaaattgctggagggtctgcgcccgcgccagctgcagccgctcctgcacccgcagccgcggcacctgctccagctgcacctgcacctgccgtttcttcagaactcttggagaaggctgagacggttgtgatggaggttttggctgcaaagactggctatgagaccgacatgattgaatctgatatggaattggagacagagcttgggatcgattccatcaaaagagtggagatcctgagtgaagtccaagccatgctcaatgttgaagctaaggatgttgatgcactttcaagaacaaggacagtgggtgaggttgtggatgccatgaaggcggagattgctggagggagcgcgcctgcgccagctgccgcggcacctgcaccggcagccgcagctccagctccagctgcaccagcaccggccgcgcccgcgccagctgtttcatccgaactcctggaaaaggccgagacggttgtgatggaggtgctcgcagctaagactggttacgagaccgacatgattgaaagtgacatggagcttgaaaccgagttgggaatagatagcatcaaacgtgttgaaatcttgtctgaggtccaagctatgttgaacgtggaggcaaaagatgtcgatgcgctttcaagaaccagaacagtcggtgaggtcgtggacgccatgaaggctgaaattgccggaagctctgctagtgcgccagctgcagccgcacctgcacctgctgccgcggcacctgctccagctgcagccgctcctgccgtcagcaatgagttgctggagaaagccgaaacagttgtgatggaagtccttgctgcaaaaactggttacgaaacggacatgattgagtcagacatggaattggagaccgaacttggaatagattccatcaagagagtggagatcctctctgaggtgcaagccatgctcaacgttgaggctaaagatgttgatgcactcagtaggacaagaactgtgggggaagttgtcgatgcgatgaaggctgagattgctggaggctctgctcctgcgccggcagctgccgcacctgcacccgcagccgcggcaccagctgtcagcaacgaattgcttgagaaggctgaaacagttgtcatggaagtgctggctgcaaaaaccggctatgagactgacatgattgagtctgacatggaacttgagacggaattgggcattgacagcatcaagcgtgttgagatcctcagtgaagtccaagcaatgctcaatgtggaggctaaggatgtggatgccctctcaaggaccagaacagttggtgaggtcgttgatgcgatgaaggcggagatcgctggaagttccgcgcctgcgccagctgcagccgctcctgcacccgcagccgcggcaccggctccagctgcagccgcaccggccgtctcctcagaactcctggaaaaggctgagacagttgtgatggaagtccttgctgcgaaaactggctatgagaccgacatgattgaatctgacatggaactggagaccgagcttggaattgactccatcaaacgtgttgaaatcctctctgaggttcaagcgatgttgaatgtggaggccaaagatgttgatgctctttccagaacaaggacggtgggagaggtggttgatgccatgaaggctgagatagctgggggttctgctcctgcgccagctgcagccgctcctgctcccgctgccgcggcaccagctgtcagcaacgaactccttgaaaaagctgaaactgttgtgatggaggttttggctgcaaagactggatacgagactgacatgatagagtcagacatggagttggaaacagagcttgggattgatagcatcaagcgtgtggaaatcctttctgaggttcaagccatgctgaacgttgaggccaaagatgtcgatgctttgtcaaggaccagaacggttggagaagtggtcgatgccatgaaggctgagatagctggtggatcagcccctgctccggctgcagccgctcctgcaagtgccggtgctgcaccagctgtgaagattgattcagttcatggtgctgactgtgacgatttgtcactgatgcacgcaaaggtggttgacatcagaaggccagatgaactgattctggaaagaccggagaaccgtccagttcttgtcgttgacgatggctcagagttgacacttgctcttgtgagggtgttgggagcctgtgcagttgtcttgacctttgagggattgcagttggctcagagagctggtgcagctgccattcgtcatgttctggctaaggacctttcagcagaatcagctgagaaggccatcaaagaggctgagcaaagatttggagcgttgggaggcttcataagccagcaagcagaaaggtttgaaccagctgagatactgggtttcacactcatgtgtgcgaagtttgccaaagcctctctctgcactgctgtggctggaggtcgtcctgccttcatcggtgtggctaggcttgacggcagacttggattcacctctcaaggcacttctgacgcactcaagagagcacagcgtggagcgatctttggactctgcaagacaatagggttggagtggtcagaatctgatgtgttcagccgtggtgtggacattgctcaagggatgcacccagaagatgctgcagttgccatagttagggagatggcgtgtgctgacatcagaatcagagaggttgggattggagcaaaccagcaaagatgcacaatcagagctgccaagttggagactgggaaccctcagagacagatagcgaaagacgatgtgcttctggtttctggaggtgctcgtgggatcacacctctttgcatccgtgagatcacgcgtcagattgctggaggcaagtacattctgttgggtcgtagcaaagtttctgcgtctgaaccagcatggtgtgctggcatcactgatgagaaggctgtgcagaaagctgccacccaagagttgaagagggccttcagtgctggtgaaggacccaaacccactccaagggctgtcacgaaacttgtgggatctgttcttggtgctcgtgaagtgagaagctccattgctgccattgaagctctgggtggcaaagcgatctacagctcttgtgatgtgaactctgctgcagatgttgccaaagcagttagggatgcagagtcccagcttggtgccagagttagtggaatcgttcacgcttctggtgtgctccgtgatcgtctcatagagaagaaactccctgacgagtttgatgctgtctttgggaccaaagtcactgggttggagaatcttctggctgcagttgatcgtgccaacctcaaacacatggttctcttcagctcccttgctggtttccacggcaatgttggtcagtctgactatgcgatggcaaacgaagctctcaacaagatgggtttggaacttgcgaaggatgtcagtgtcaagtccatctgctttggtccctgggatggtgggatggtgacacctcaactcaagaaacagtttcaagaaatgggagttcagatcattcctcgtgaaggaggtgctgatacagttgcgaggattgtgttgggatcaagtcctgctgagatccttgttggaaactggaggacaccatccaagaaagttggaagtgacacgatcaccctgcatagaaagatcagtgccaagtccaatcccttcttggaggatcatgtcatacaaggcagaagggtgttgccaatgacccttgctattgggagccttgctgagacctgccttggactcttccctggctactctctctgggccatagatgacgcacagctcttcaaaggtgtcactgttgatggagacgtcaactgtgaagtgaccctcacaccgtccactgctccgagtgggagggtgaatgtccaagcgacgctcaagacgttctcaagtggaaaacttgttccagcctacagagctgtcatagtgttgtccaaccaaggtgctccacctgccaatgcaaccatgcagcctccgagccttgatgcagatcctgctttgcaagggtcagtctatgatggcaagactctctttcatggtcctgcgttcagaggcattgatgacgttctcagctgcaccaagagccagcttgttgccaagtgttctgctgttcctggatcagatgcagccagaggagagtttgcaactgacactgatgcacatgatccctttgtcaatgatcttgcctttcaagcaatgttggtctgggtgaggagaacgctgggacaagctgcactcccgaactccattcagaggatagtccaacacagaccggtcccacaagacaaacccttctacatcaccctcagatccaatcagagtggtggacatagccagcacaaacatgcacttcagttccacaacgaacaaggtgatctcttcattgatgttcaagcctctgtcattgcgacagactcacttgcgttctgagtagttagcttaatcacttaggtcaccagtatgaactaaaatgcatgtaggtgtaagagctcatggagagcatggaatattgtatccgaccatgtaacagtataataactgagctccatctcacttcttctatgaataaacaaaggatgttatgatatattaacactctatctatgcaccttattgttctatgataaatttcctcttattattataaatcatctgaatcgtgacggcttatggaatgcttcaaatagtacaaaaacaaatgtgtactataagactttctaaacaattctaactttagcattgtgaacgagacataagtgttaagaagacataacaattataatggaagaagtttgtctccatttatatattatatattacccacttatgtattatattaggatgttaaggagacataacaattataaagagagaagtttgtatccatttatatattatatactacccatttatatattatacttatccacttatttaatgtctttataaggtttgatccatgatatttctaatattttagttgatatgtatatgaaaaggtactatttgaactctcttactctgtataaaggttggatcatccttaaagtgggtctatttaattttattgcttcttacagataaaaaaaaaattatgagttggtttgataaaatattgaaggatttaaaataataataaataataaataacatataatatatgtatataaatttattataatataacatttatctataaaaaagtaaatattgtcataaatctatacaatcgtttagccttgctggaacgaatctcaattatttaaacgagagtaaacatatttgactttttggttatttaacaaattattatttaacactatatgaaattttttttttttatcagcaaagaataaaattaaattaagaaggacaatggtgtcccaatccttatacaaccaacttccacaagaaagtcaagtcagagacaacaaaaaaacaagcaaaggaaattttttaatttgagttgtcttgtttgctgcataatttatgcagtaaaacactacacataacccttttagcagtagagcaatggttgaccgtgtgcttagcttcttttattttatttttttatcagcaaagaataaataaaataaaatgagacacttcagggatgtttcaacccttatacaaaaccccaaaaacaagtttcctagcaccctaccaacgaattcgcggccgcttaattaagatgagtgatactcaggactcaggactcactctgctgatcactagtgctagcctcgaggtcgacacaactttgtatacaaaagttgtctagacctaggctcagcaactcatccagtcaagttcgagtcagtgagttgggcggccgcagcttatagtaaagatttttttgttaataaaatgaaagttaatatttatggatttatttgaacatatttacaagtttttgttaataaatttatttacagaagtgttaaatttgaaaatgtgttaaatgagagttaatatttatggatataatattactttatttaaaaataaaatgaatttatattaaaatatgatttggtaaaagatattataaagaggaacttggatgagaaagacgacgatgggcaaaagttgcatggcacaccgcttttgttcagtaacatctgcactgtggcgcctttttcacactcaccatgcatgctgccacgtcagctttcacactatgacaccactggccatacacgttgccacctcagctttctcctcttctcactatgacacgactggccatgcatgcatgcatgctgccacctcagctcccgcctcttcacccgtgtctttctctcatgtcgcagtgctgcgtgccaacctcttctctctataaatagagagaagagaatgatggttaaactcaaaccaaaacaagaaaacatacacaaatagcaaaacggatccacaaccaaaaatggctgcaaggaacgtgagtgcggctcatgagatgcatgacgagaagaggatagctgttgtgggcatggctgttcagtatgctggatgcaaaacgaaagacgagttctgggaagttctcatgaatggaaaagttgagagcaaagtgatcagcgacaaacgtcttggttcaaattaccgtgctgaacactacaaagctgaaaggagcaagtatgctgacaccttctgcaatgagacatatggaactcttgatgagaacgaaatagacaatgagcatgaactccttttgaaccttgccaaacaagccttggctgaaacatctgtcaaagattcaacaagatgtggcatagtttctggatgcctcagcttcccgatggacaacctccaaggtgaactcttgaatgtgtaccagaaccatgttgagaagaaacttggtgccagagttttcaaagatgcctctcactggtcagaaagagaacagtccaacaaaccagaggctggtgacagaagaatcttcatggaccctgcttcctttgttgctgaggaactcaatcttggcgctctccactactctgttgatgctgcctgtgccactgcgctctatgtgctcagactggcgcaagatcacttggtctctggtgcagctgatgtgatgctttgtggtgcaacatgcctgccggagccgtttttcatactctctgggttctcaaccttccaagccatgcctgttggaacgggtcagaatgtgtccatgccgctgcacaaagattctcaaggattgacccctggtgaaggaggttccatcatggtcctcaaacgtttggatgacgcaatcagagatggagatcacatctatggaacacttttgggagccaatgtcagcaacagtggcactggtctgccacttaaaccccttttgccgtcagagaaaaagtgcctcatggacacctacacacgtatcaatgtgcatccccacaagattcagtatgttgaatgccatgcaactgggactccacaaggtgatcgtgtggaaattgatgctgtgaaggcttgctttgaaggcaaagtcccacgttttggaaccacaaaagggaactttggacacacattggtggcagctgggtttgctggcatgtgcaaagtgcttctctccatgaagcacgggatcattccacccactccgggaatagatgacgaaacgaagatggaccctctggttgtctctggtgaggccattccctggccagaaacgaatggagaaccgaagcgtgctggtctctcagcgtttggatttggtgggaccaatgctcatgctgtctttgaggaacatgacccaagcaatgctgcatgcactggccatgactccatttctgctctctctgcacgttgtggtggtgagtcaaacatgagaatagcaatcactgggatggatgccacttttggtgctttgaaaggattggatgcttttgaaagggccatctacactggtgctcatggtgctataccactcccagaaaagagatggagattcctggggaaagacaaggacttccttgatctttgtggagtcaaagcaacaccgcatggctgttacattgaagatgttgaagttgatttccagaggctgaggactccaatgactcctgaagatatgctcttgcctcaacagcttctggctgtcaccacaattgatagggccatattggactctggcatgaagaaaggtggaaatgtggctgtctttgtggggttggggaccgatcttgaactctaccgtcaccgtgcaagggttgctctcaaggagagagtgaggcctgaagccagcaagaaactcaatgacatgatgcagtacatcaatgattgtgggacaagcacttcttacaccagctacataggcaacttggttgcaacaagggtcagttcacaatggggcttcacgggaccttccttcacaatcacagaaggcaacaattctgtgtacagatgtgctgaacttggcaaatacctcttggaaacgggagaggttgatggggttgtggttgcgggtgttgatctctgtgggagtgctgagaacctttacgtcaagtcaaggcgtttcaaggtgtctacatctgacaccccgagagccagctttgatgcagctgctgatggttactttgttggagagggctgtggtgcatttgtgctcaagcgtgagacaagctgcaccaaggatgacagaatctatgcttgcatggatgccatagttcctggaaatgttccatctgcatgtttgagagaggcattggatcaagccagagtcaagcctggagacatcgagatgttggagctttctgctgattcagcgaggcatttgaaggacccgtctgttctcccaaaggaactcactgctgaggaagagattggcggacttcagacgattcttcgtgacgatgacaagctcccaaggaatgttgcaactggaagtgtcaaggccactgttggtgacactggttatgcttctggtgctgccagtttgattaaggctgcgctttgcatctacaaccgttacctgcccagcaatggagatgactgggatgaacctgcacctgaagcaccctgggacagcacactctttgcgtgccagacctcaagagcttggttgaagaaccctggtgagagacgttatgcggctgtttccggagtcagtgaaaccagaagttgctacagtgtgctgctttctgaagcagagggacactacgagagagagaacagaatcagtttggatgaggaagcacccaagctcattgtgttgagagcagactcccatgaagagattcttggaagattggacaagataagggaaaggttcttgcagcccacgggtgctgcacccagagagtctgaattgaaggcgcaagcccgtaggatctttcttgaactccttggtgagacccttgcccaagatgcagcttcatctggaagtcagaagccccttgctctcagcttggtctccactccatccaagctccagagagaggtggaacttgcggcaaaaggcattccgagatgtctcaagatgagacgtgattggagttcccctgctggaagcagatatgcgcctgagcctttggccagtgacagagttgccttcatgtatggagaaggaaggagcccttactatggcatcacacaagacattcataggatttggcctgaacttcatgaggtcatcaatgagaaaacaaaccgtctctgggctgaaggtgacagatgggtcatgccaagggccagcttcaagagtgagcttgagtcacaacagcaagagtttgacagaaacatgattgaaatgttccgtcttggaatcctcacctcaattgccttcacaaacctggcgagagatgttctcaacatcacgcccaaagcagcctttggactcagtttgggagagatttccatgatctttgctttctccaagaaaaacggtttgataagcgatcagttgacaaaggatttgagagagtcagatgtctggaacaaagctctggctgttgagttcaatgcgctcagagaagcctggggcattccacagtctgtcccaaaagatgagttctggcaaggttacatagtgaggggaacgaaacaagacatagaagcagccatagcaccagactcaaagtatgtgaggttgaccatcatcaatgatgccaacactgctctcatcagtggaaagcctgatgcatgcaaagctgcgattgctcgtcttggtggcaacatccctgcgcttccagtcactcaaggcatgtgtgggcattgcccagaggtgggaccttacaccaaggacatcgcaaagatccacgccaaccttgagttccctgtggttgatggtcttgatctctggactaccataaaccagaagaggcttgtgccaagagccacgggtgccaaagatgaatgggctccttcatcctttggggagtatgctggacagctctatgagaaacaagccaacttccctcagatagttgaaaccatctacaagcagaactatgatgtgtttgttgaagttgggccaaacaatcacagaagcacagcagtgagaaccacgcttggaccacagagaaaccaccttgctggtgccatagacaagcagaacgaggatgcttggacgacaatagtcaagctcgtggcttcattgaaggctcaccttgttcctggagtgaccatcagtccgctctaccactccaagctcgttgcagaggctgaggcttgttatgctgcgctctgtaaaggtgagaaacccaagaaaaacaagtttgtgagaaagattcagttgaatggcagattcaacagcaaggcagaccccatctcctcagcagaccttgcatccttcccacctgcggaccctgcgattgaagctgccatctcttcaaggatcatgaagcctgtggctccgaaattctatgcgcgtctcaacattgatgagcaagatgagaccagagatccgatcttgaacaaggacaatgcgccttccagctccagctcttccagcagttcctcttccagcagttcatctccgtctcctgctccttcagctccagttcagaagaaagctgccccagctgcggagacaaaagctgttgccagtgctgatgcacttcgtagtgccctgcttgatcttgactccatgcttgcgctcagctctgcaagtgcttctggcaaccttgttgagactgcgccatctgatgccagtgtcattgtccctccgtgcaacattgctgatcttggcagcagagctttcatgaaaacttatggtgtttctgcgcctctgtacaccggtgcaatggccaagggaattgcctctgcggacttggtgatcgcagctggaaggcaaggaatccttgcgtcatttggtgctggaggccttccaatgcaagttgtgcgtgagtccattgaaaagattcaagctgccctgcccaatggaccatatgctgtcaacctcatccattctccttttgacagcaaccttgagaagggaaatgttgatctcttcttggaaaagggtgtcacttttgttgaggcttcagccttcatgacgttgacaccgcaagttgtcagatacagagcggctgggttgacgaggaatgcagatgggtcagtcaacataaggaacagaatcattgggaaagtctccagaactgagctggctgaaatgttcatgcgtcctgcacctgagcatcttttgcagaagctcattgcttctggggagatcaatcaagaacaagctgagttggccagacgtgttcctgtggctgatgacattgcggttgaagctgattctggtggacacactgacaaccgtccaatccatgtcattctgcctctgattatcaacctgagggataggcttcacagagagtgtggatacccagcaaacctgagggttcgtgttggtgctgggggtggcattgggtgtccccaagctgcgctggcaactttcaacatgggtgcctctttcattgtcactggaacagtgaaccaagttgccaaacaatctgggacgtgtgacaatgtgaggaaacagcttgcgaaagcaacttactcagatgtttgcatggcaccggcagctgacatgtttgaggaaggtgtgaaacttcaagttttgaagaaaggaacaatgttcccttcaagagccaacaaactctatgagttgttctgcaagtatgattcttttgagtccatgcctccagcagagcttgcgagggttgagaaaagaatcttcagtcgtgcattggaagaggtctgggatgagaccaagaacttctacatcaaccgtctccacaacccagagaagatacagagggctgagagggaccccaaactgaagatgtcactgtgtttcagatggtatctgtccctggcttcaaggtgggccaacactggagcttctgacagagtcatggactaccaagtttggtgtggtcctgccattggttcattcaatgatttcatcaaaggaacttaccttgatccggcagtggcaaatgagtacccgtgtgttgtgcagatcaacaaacagattcttagaggagcgtgcttcttgaggcgtcttgaaatactgagaaatgcaaggctttcagatggtgcagctgcacttgtggcgagcattgatgacacatatgtccctgctgagaagctgtgagtagttagcttaatcacttaggtcacccagtccaagcccggcctagcacgatgatcatgagtgttgctattgatgtatgttaatactatacacagtcatcgtgtgtgttttataaaactgtaagcttaggatgtttgaggctaatgtaattagcactacaccgtaataaatgagaggtttactttatgttttaataatgttcttacccttgctgctctctaaactgtaatggcgtacggttagctaaactaaagtaaaaatcgattcgcttgagtaaaattagtgaccgggaaagatcatcgactactactgctcagagatgtaatcggtaattaagacttcaagctcaataattaattaggagtaaatctggcttcgaatttttaaattgtcaacttccaaagaaggattggcaagactcaatctcaattgcccaacaaacatatggctctttacaaatttggaatctctttttgatggcaagaacgtcgtaattcctctgtcgatctcatgtaattaccaaactcatctacttattactttctttatatgcacttactgatgcggccgcttaattaatctgacctgaccactagacctgagtgagtacagatgtgctactagtgctagcctcgaggtcgaccaacttttctatacaaagttgtctagacctaggactaggcactgagtgactcactgacctgactgagtgactggcggccgcagcttatagtaaagatttttttgttaataaaatgaaagttaatatttatggatttatttgaacatatttacaagtttttgttaataaatttatttacagaagtgttaaatttgaaaatgtgttaaatgagagttaatatttatggatataatattactttatttaaaaataaaatgaatttatattaaaatatgatttggtaaaagatattataaagaggaacttggatgagaaagacgacgatgggcaaaagttgcatggcacaccgcttttgttcagtaacatctgcactgtggcgcctttttcacactcaccatgcatgctgccacgtcagctttcacactatgacaccactggccatacacgttgccacctcagctttctcctcttctcactatgacacgactggccatgcatgcatgcatgctgccacctcagctcccgcctcttcacccgtgtctttctctcatgtcgcagtgctgcgtgccaacctcttctctctataaatagagagaagagaatgatggttaaactcaaaccaaaacaagaaaacatacacaaatagcaaaacggatccacaaccaaaaatggcgcttcgtgtcaagaccaacaagaagccatgttgggagatgaccaaggaggaactgacctctggcaaaactgaggtgttcaactatgaggaactcctggagtttgcagagggtgacatagctaaggtttttggtccggagtttgctgtcatagacaagtaccccagaagggtgaggctgcctgctcgtgaatacctgcttgtgacaagggtcacactcatggatgccgaggtcaacaactacagagttggtgccagaatggtcactgagtatgatcttccagtgaatggcgaattgtctgagggaggtgattgtccctgggcagttctggttgagagtggacagtgcgatttgatgctgatatcatacatgggaattgatttccagaaccaaggtgacagagtttaccgtctgctcaacaccacgttgacattctatggggttgcccatgagggagagacccttgagtatgacatcagagtgaccggttttgccaaacgtttggatggtggcatctccatgttcttctttgagtatgactgctatgtcaatgggaggcttctcattgagatgagagatggctgtgctggcttcttcacaaatgaggagcttgatgcgggaaagggtgtggtgttcacaagaggggatttggctgccagagctaagattccaaagcaagatgtttctccctatgctgtcgctccctgccttcacaaaacaaaactcaacgaaaaggagatgcagaccttggttgacaaagattgggcttccgtttttggctcaaagaatggcatgccggagatcaactacaaactctgcgcacgtaagatgctcatgattgatagagtcaccagcattgaccataagggaggtgtgtacggtttgggtcagttggttggtgagaaaatcttggagagggaccattggtacttcccatgccattttgttaaggatcaagtcatggctggatctcttgtcagcgacggttgttcacaaatgctcaagatgtacatgatctggctcggtttgcaccttaccaccggaccatttgacttcagacccgtcaacggacacccgaacaaagttaggtgtaggggtcagatatctcctcataagggaaagttggtctacgtcatggagatcaaagagatgggattcgacgaggataacgatccgtacgccattgctgacgtcaacatcattgacgttgatttcgaaaagggtcaagatttcagccttgatagaatcagcgactacggaaagggggatcttaacaaaaagatcgtcgtggacttcaagggcattgctctcaagatgcagaagagatccacgaacaagaacccctccaaagttcagcccgtttttgctaacggtgcagccactgtgggaccggaagcgtccaaggccagctctggtgccagtgctagtgcttctgctgcccctgcgaagcctgctttctcagcagatgttcttgcgccaaagccagttgcacttcctgaacatatcctcaagggtgacgctctcgctccgaaagaaatgtcctggcatcccatgtcaaaacttcctggcaacccgacgccgttcttctcccctagttcttaccctccgagggcaatttgcttcatccctttccctggcaacccacttgacaacaattgcaaagctggagaaatgcctctgaactggtacaacatgtcagagttcatgtgtggaaaagttagcaactgcttgggaccagagttcgcaagatttgataagtcaaatacgagcagaagccctgcttttgatttggctcttgtgactagagttgttgaagtcacaaacatggaacatggcaagttcctgaatgttgattgcaatcccagcaaaggcacaatggtgggggagtttgactgtcctcaagatgcgtggttctttgatggttcttgcaatgatgggcacatgccttattccatcatcatggaaatcggacttcagacatccggtgttctcaccagtgtgttgaaagcaccactgacgatggacaaagatgacattctctttaggaaccttgatgcaagtgctgaaatggtgaggccagatgtggatgtgagggggaaaaccataaggaatgtgaccaagtgcactggatatgcaatgttgggaaagatggggattcacagattcacgtttgagttgtctgttgatggcgtggttttctacaaaggaagcacttcctttggatggttcactccagaggtgtttgctcagcaagctggacttgacaatgggaaaaagacggagccttggtgcaaaactaacaacacgagtgtgagaagagttgaaatcgcatcagccaaaggcaaagaacagctgactgagaaacttccagatgcaactaatgctcaagttctcagaaggtcagaacagtgtgagtatttggattacctcaacattgctcctgattctgggctgcatgggaaaggatatgcgcatggacacaaagatgttaacccacaagactggttcttctcttgtcacttttggtttgatcctgtgatgcctggatctttgggaattgagtcaatgttccagctcattgaggcatttgcggtggaccagaacataccgggagaatacaatgtgagcaatccgacctttgcccatgcccctggaaaaacggcgtggaagtaccgtggtcaattgacaccaaagaaccgtgcgatggactgtgaggtgcacatagtttcaatcacagcctctcctgaaaatggaggctacgttgacatagtggcagatggagcactttgggttgatggtctccgtgtgtatgaagccaaagaactcagagttcgtgttgtcagtgcaaaacctcaagccattccggatgttcaacaacagccacccagcgcaaaagcggaccctgggaaaactggagttgcactcagtccgactcagttgagagatgtcctgcttgaagtggacaatccattgtatcttggtgttgaaaactccaatttggtgcagtttgaatccaaacctgcaacttcttcaaggattgtcagtatcaaaccatgctccataagtgatcttggtgacaagtccttcatggaaacgtacaatgtgtcagcacctctgtacactggagcaatggccaagggaattgcgtctgcggaccttgtcattgctgctgggaagaggaagatattgggttcttttggagcgggtgggcttccaatgcaccatgtgagggcagctttggagaagatacaagcggctctgcctcaaggaccatatgctgtgaacctcattcattcaccttttgacagcaacttggaaaaggggaatgttgatctcttcctcgaaaagggcgttactgtggtggaggcttctgcattcatgaccctcactccccaagttgttcgttaccgtgcagccggactctcaaggaacgctgatgggagtgtcaacatcagaaaccgtatcattggaaaagtgtccagaacagaactcgccgaaatgttcatcagaccggctccggaacacctccttgagaaactcatagcttctggtgagataacacaagaacaagccgaacttgcccgtcgtgttcctgtcgcagacgacatcgctgttgaagctgattctggtggtcacactgacaaccgtcccatccacgtcatcttgcctttgatcatcaaccttaggaacagactgcacagagagtgtggttatcctgcgcaccttagagtcagagttggagctggaggcggtgttggctgcccacaagctgctgcggctgccctcacaatgggagctgccttcatagtgactgggactgtcaatcaagttgctaaacagtccgggacatgtgacaacgtgagaaaacaactcagtcaagccacctacagtgacatttgcatggctccagcagctgatatgtttgaggaaggtgtgaaactccaagttctcaagaagggaacaatgttcccatcaagagctaacaaattgtacgaactcttttgcaagtacgactctttcgattcaatgcctcctgctgaacttgaaaggatcgagaagaggatcttcaagagggcacttcaagaggtctgggaagagaccaaggacttttacatcaatggtttgaagaatccagagaagatacagagagcggaacatgaccccaaactcaagatgtctttgtgtttcagatggtatcttggtcttgcatcacgttgggccaacatgggtgctcctgatcgtgtcatggactatcaagtctggtgtggtccagccattggagccttcaatgacttcatcaaaggaacatatcttgatcctgctgtctctaatgagtacccatgtgttgtccagatcaaccttcagattttgcgtggtgcatgttacctgaggcgtcttaatgctctgagaaatgatccgaggattgatcttgagactgaagatgctgcctttgtctatgagccaacgaatgcgctttgagtagttagcttaatcacttaggtcacccagtccaagcccggcctagcacgatgatcatgagtgttgctattgatgtatgttaatactatacacagtcatcgtgtgtgttttataaaactgtaagcttaggatgtttgaggctaatgtaattagcactacaccgtaataaatgagaggtttactttatgttttaataatgttcttacccttgctgctctctaaactgtaatggcgtacggttagctaaactaaagtaaaaatcgattcgcttgagtaaaattagtgaccgggaaagatcatcgactactactgctcagagatgtaatcggtaattaagacttcaagctcaataattaattaggagtaaatctggcttcgaatttttaaattgtcaacttccaaagaaggattggcaagactcaatctcaattgcccaacaaacatatggctctttacaaatttggaatctctttttgatggcaagaacgtcgtaattcctctgtcgatctcatgtaattaccaaactcatctacttattactttctttatatgcacttactgatgcggccgcttaattaatcacgagtggatgactgtcacgactgactcatgactgactactagtgctagcctcgaggtcgacacaactttgtataataaagttgtctagacctaggcgagtcatgagtcgtgacatgacgtcatgctcatcagactgcggccgcagcttatagtaaagatttttttgttaataaaatgaaagttaatatttatggatttatttgaacatatttacaagtttttgttaataaatttatttacagaagtgttaaatttgaaaatgtgttaaatgagagttaatatttatggatataatattactttatttaaaaataaaatgaatttatattaaaatatgatttggtaaaagatattataaagaggaacttggatgagaaagacgacgatgggcaaaagttgcatggcacaccgcttttgttcagtaacatctgcactgtggcgcctttttcacactcaccatgcatgctgccacgtcagctttcacactatgacaccactggccatacacgttgccacctcagctttctcctcttctcactatgacacgactggccatgcatgcatgcatgctgccacctcagctcccgcctcttcacccgtgtctttctctcatgtcgcagtgctgcgtgccaacctcttctctctataaatagagagaagagaatgatggttaaactcaaaccaaaacaagaaaacatacacaaatagcaaaacggatccacaaccaaaaatgcccactccagatgccactgcgcctctcaacaagccgtcagactatgctgtgtaccacgaagaggatggtcctttctggactgctgattcctctggtgtcagcagagtgaacttctctgaaactggtgtgggatctgaaggtgtcattcctgcgctcacactgattgatgtgtttgagcgtgcggtcaaacgtggtggcaataggattgcattcagaacagagaacatgccaaccttgaggcgtggagaagaggctcctgatgctttgccgctcaaagattggaagtcctggtcttggaaacagtacaaagctgatgttcacagaattgcgagggctctgatggatttgggagttgagcagcacgatgcggtctccatctttggcttcaactcaccagaatggttcctcagtgctgtcggtgcagttcatgctggtgccaagatcgctggaatctacccttcagacactcctgctcaagtgcagtacaaagccttccactctgacactgctgttgcagttgtggagaacgaacagtgcttcaagaaattcgcagaggtggttgaggatctcccttacctcaaagccattgtttgttgggattatgaagccacagacatcacaagggaagatggttcagtggttgaagtcctgacctttgctgagttcctgaagagaggtgacactgtggaagcagctgcacttgatgagagaatcagcaagattgagcccaccatgtgtgctgccctgatctacaccagtggcacaactgggagacccaaagctgtcatgatctcccatgacaaccttgtctttgaagcatctgctgtggtcccgaacttgggaggggcatgcacgaccactgctgaggaaaggattctttcctaccttcctttgtctcatgttgctggaatgatggttgacatcattgctccaatcatagcgacagcgttccacaaaggaaggatctgtgtttgttttgccagaccgtatgatttgagaactggaacccttgggcaaagactcaatgcagtggagccaaccatattccttggtgtgccacgtgtgtgggaaaagatccaagagaaattgatggctgttggtgccaaaaccactggtctcaagaagaaactcagcacggcagccaagaaacgtgggcttgaatttcaagaggaacaacagatagggagaagtggtgccaaccctggctttggaccgcttggaatctacaagaaacttttgggcctcatcaaaggaaagttggggctgaccaaatgcaagtttgcctttgctggcgcagctccaatgacccgtgaaacccttcagtactttggagcgctgaacatcaacatcaatgaggtctatggaatgtctgaatgcagtggggctgccacctggtcaactgacaaagctcatgagtggggcactgttggctatgagatgccctcctgtgaagtcagagtgttcaagattgcggaggatggcaccaagacagagtgcccaagagctgctgacatcatgcatgccacagaagaggaacaaggtgaagtttgcttccgtggaaggaacatcatgatgggatacttggccaacccgaaacttggtgatgaccatgttgctgagattgaagagaagaatgcagctgccatagatagcgaagggtggcttcactctggtgacaagggagcaatttccacaaggggaatgctcaagataacgggcagatacaaggagcttatcataggtgctggtggggagaatgtggctcctgttcccattgaagatgccatcaaggcgaggatgccttttgtttcaaatgcaatgatggttggagacaagaggaagttcatggctgtccttctgactttgaaaacggttggagcaactggagagcttcctggcacaaacaagctcatgggagcagctgcggactatggtgagaccattgaggatgcctgtgacaatgaggcgctcattgaagagataacgcagcaactcaaagagataggtgacgatggagatgtcacgccaagcaatgcagcccgtatacaaaagttcacgattttgccactcgacttcagtgtctccacagatgaactgacagcaacgttgaaattgaagagaagtgtggttgcagacaagtatgaggacatcatagaggctttctatgagagcaagtctgtctttgtgccttactcaacagttggagcttatgcaacgggtggaccagttgatgactctgttgtggatggatcattcaaaggtgactttagcatgattggggatgacgatccggatcttcagaatgtggatgtccttgaagcaattgatgaggacaactgagtagttagcttaatcacttaggtcacccagtccaagcccggcctagcacgatgatcatgagtgttgctattgatgtatgttaatactatacacagtcatcgtgtgtgttttataaaactgtaagcttaggatgtttgaggctaatgtaattagcactacaccgtaataaatgagaggtttactttatgttttaataatgttcttacccttgctgctctctaaactgtaatggcgtacggttagctaaactaaagtaaaaatcgattcgcttgagtaaaattagtgaccgggaaagatcatcgactactactgctcagagatgtaatcggtaattaagacttcaagctcaataattaattaggagtaaatctggcttcgaatttttaaattgtcaacttccaaagaaggattggcaagactcaatctcaattgcccaacaaacatatggctctttacaaatttggaatctctttttgatggcaagaacgtcgtaattcctctgtcgatctcatgtaattaccaaactcatctacttattactttctttatatgcacttactgatgcggccgcttaattaatctgatcatggatgctacgtcacggcagtacaggactatcactagacctaggagctgtgctgggtaactcacatgagtcactggtcacatcagcggccgcagcttatagtaaagatttttttgttaataaaatgaaagttaatatttatggatttatttgaacatatttacaagtttttgttaataaatttatttacagaagtgttaaatttgaaaatgtgttaaatgagagttaatatttatggatataatattactttatttaaaaataaaatgaatttatattaaaatatgatttggtaaaagatattataaagaggaacttggatgagaaagacgacgatgggcaaaagttgcatggcacaccgcttttgttcagtaacatctgcactgtggcgcctttttcacactcaccatgcatgctgccacgtcagctttcacactatgacaccactggccatacacgttgccacctcagctttctcctcttctcactatgacacgactggccatgcatgcatgcatgctgccacctcagctcccgcctcttcacccgtgtctttctctcatgtcgcagtgctgcgtgccaacctcttctctctataaatagagagaagagaatgatggttaaactcaaaccaaaacaagaaaacatacacaaatagcaaaacggatccacaaccaaaaatgcttcagcacacttggcttccgaagcctcccaatctgaccctcttgtcagatgaggttcatctctggaggattcctcttgaccagcctgagtcacaacttcaagaccttgctgccaccctgagcagtgatgaattggcgagggcaaacagattctactttccagaacacagaaggcgtttcactgctgggagaggcatcctcagatccatcttgggtggatacttgggagtggaaccgggtcaagtcaagtttgattatgagtcccgtgggaaaccgatccttggtgacagatttgctgagagtggactcctgttcaacttgtctcacagccagaaccttgccttgtgtgctgtcaactacacgcgtcaaataggcattgatcttgaatatctgcgtccaacatctgacttggagtctcttgcaaagaggttctttctcccaagagaatatgaactcttgaggtcactccctgatgagcagaaacagaagattttctttcgttactggacttgcaaagaggcttatctcaaagcaacgggagatggaatagccaaacttgaagagatcgagatagcactcaccccaacagaacctgccaagctccaaacagctcctgcgtggtctctgttggagcttgtgccagatgacaattgtgttgcagctgtggctgttgcgggttttggttggcagcccaagttctggcattactgagtagttagcttaatcacttaggtcacccagtccaagcccggcctagcacgatgatcatgagtgttgctattgatgtatgttaatactatacacagtcatcgtgtgtgttttataaaactgtaagcttaggatgtttgaggctaatgtaattagcactacaccgtaataaatgagaggtttactttatgttttaataatgttcttacccttgctgctctctaaactgtaatggcgtacggttagctaaactaaagtaaaaatcgattcgcttgagtaaaattagtgaccgggaaagatcatcgactactactgctcagagatgtaatcggtaattaagacttcaagctcaataattaattaggagtaaatctggcttcgaatttttaaattgtcaacttccaaagaaggattggcaagactcaatctcaattgcccaacaaacatatggctctttacaaatttggaatctctttttgatggcaagaacgtcgtaattcctctgtcgatctcatgtaattaccaaactcatctacttattactttctttatatgcacttactgatgcggccgcttaattaactactgtcactgaggccgtagacgagtacggactgatctaactagtgctagcctcgaggtcgacacccagcttt

SEQ ID NO: 50 - DNA, 39630 bp, Artificial sequence
  plasmid pDAB101412
cttgtacaaagtggttgcggccgcttaattaaatttaaattcaattaatgcaatcttgattttcaacaacgaaggtaatggcgtaaaagaaaaaatgtatgttattgtattgatctttcatgatgttgaagcgtgccataatatgatgatgtataattaaaatattaactgtcgcattttattgaaatggcactgttatttcaaccatatctttgattctgttacatgacacgactgcaagaagtaaataatagacgccgttgttaaagaattgctatcatatgtgcctaactagagggaatttgagcgtcagacctaatcaaatattacaaaatatctcactctgtcgccagcaatggtgtaatcagcgcagacaaatggcgtaaagatcgcggaaaaacctccccgagtggcatgatagctgcctctgtattgctgatttagtcagccttatttgacttaagggtgccctcgttagtgacaaattgctttcaaggagacagccatgccccacactttgttgaaaaacaaattgcctttggggagacggtaaagccagttgctcttcaataaggaatgtcgaggaggcaatgtaaccgcctctggtagtacacttctctaatccaaaaatcaatttgtattcaagataccgcaaaaaacttatggtttaaaccctgcaggactagtccagaaggtaattatccaagatgtagcatcaagaatccaatgtttacgggaaaaactatggaagtattatgtaagctcagcaagaagcagatcaatatgcggcacatatgcaacctatgttcaaaaatgaagaatgtacagatacaagatcctatactgccagaatacgaagaagaatacgtagaaattgaaaaagaagaaccaggcgaagaaaagaatcttgaagacgtaagcactgacgacaacaatgaaaagaagaagataaggtcggtgattgtgaaagagacatagaggacacatgtaaggtggaaaatgtaagggcggaaagtaaccttatcacaaaggaatcttatcccccactacttatccttttatatttttccgtgtcatttttgcccttgagttttcctatataaggaaccaagttcggcatttgtgaaaacaagaaaaaatttggtgtaagctattttctttgaagtactgaggatacaacttcagagaaatttgtaagtttgtaggtaccagatctggatcccaaaccatgtctccggagaggagaccagttgagattaggccagctacagcagctgatatggccgcggtttgtgatatcgttaaccattacattgagacgtctacagtgaactttaggacagagccacaaacaccacaagagtggattgatgatctagagaggttgcaagatagatacccttggttggttgctgaggttgagggtgttgtggctggtattgcttacgctgggccctggaaggctaggaacgcttacgattggacagttgagagtactgtttacgtgtcacataggcatcaaaggttgggcctaggatctacattgtacacacatttgcttaagtctatggaggcgcaaggttttaagtctgtggttgctgttataggccttccaaacgatccatctgttaggttgcatgaggctttgggatacacagcccggggtacattgcgcgcagctggatacaagcatggtggatggcatgatgttggtttttggcaaagggattttgagttgccagctcctccaaggccagttaggccagttacccaaatctgagtagttagcttaatcacctagagctcgatcggcggcaatagcttcttagcgccatcccgggttgatcctatctgtgttgaaatagttgcggtgggcaaggctctctttcagaaagacaggcggccaaaggaacccaaggtgaggtgggctatggctctcagttccttgtggaagcgcttggtctaaggtgcagaggtgttagcgggatgaagcaaaagtgtccgattgtaacaagatatgttgatcctacgtaaggatattaaagtatgtattcatcactaatataatcagtgtattccaatatgtactacgatttccaatgtctttattgtcgccgtatgtaatcggcgtcacaaaataatccccggtgactttcttttaatccaggatgaaataatatgttattataatttttgcgatttggtccgttataggaattgaagtgtgcttgaggtcggtcgccaccactcccatttcataattttacatgtatttgaaaaataaaaatttatggtattcaatttaaacacgtatacttgtaaagaatgatatcttgaaagaaatatagtttaaatatttattgataaaataacaagtcaggtattatagtccaagcaaaaacataaatttattgatgcaagtttaaattcagaaatatttcaataactgattatatcagctggtacattgccgtagatgaaagactgagtgcgatattatggtgtaatacataggaattcgtttaaacgatctgcgtctaattttcggtccaacttgcacaggaaagacgtcgaccgcggtagctcttgcccagcagactgggcttccagtcctttcgctcgatcgggtccaatgttgtcctcagctgtgaaccggaagcggacgaccaacagtggaagaactgaaaggaacgagccgtctataccttgatgatcggcctctggtgaagggtatcatcgcagccaagcaagctcatgaaaggctgatgggggaggtgtataattatgaggcccacggcgggcttattctttagggaggatctatctcgttgctcaagtgcatggcgcaaagcagttattggagtgcggattttcgttggcatattattcgccacgagttagcagacgaagagaccttcatgaacgtggccaaggccagagttaagcagatgttacgccctgctgcaggcctttctattatccaatagttggttgatctttggaaagagcctcggctgaggcccatactgaaagagatcgatggatatcgatatgccatgttgtttgctagccagaaccagatcacatccgatatgctattgcagcttgacgcagatatggaggataagttgattcatgggatcgctcaggagtagctcatccatgcacgccgacaagaacagaaattccgtcgagttaacgcagccgcttacgacggattcgaaggtcatccattcggaatgtattagtttgcaccagctccgcgtcacacctgtcttcatttgaataagatgttagcaattgtttttagctttgtcttgttgtggcagggcggcaagtgcttcagacatcattctgttttcaaattttatgctggagaacagcttcttaattcctttggaaataatagactgcgtcttaaaattcagatgtctggatatagatatgattgtaaaataacctatttaagtgtcatttagaacataagttttatgaatgttcttccattttcgtcatcgaacgaataagagtaaatacaccttttttaacattacaaataagttcttatacgttgtttatacaccgggaatcatttccattattttcgcgcaaaagtcacggatattcgtgaaagcgacataaactgcgaaatttgcggggagtgtcttgagtttgcctcgaggctagcgcatgcacatagacacacacatcatctcattgatgcttggtaataattgtcattagattgtttttatgcatagatgcactcgaaatcagccaattttagacaagtatcaaacggatgtgacttcagtacattaaaaacgtccgcaatgtgttattaagttgtctaagcgtcaatttgatttacaattgaatatatcctgccccagccagccaacagctcgatttacaattgaatatatcctgccggccggcccacgcgtgtcgaggaattctgatctggcccccatttggacgtgaatgtagacacgtcgaaataaagatttccgaattagaataatttgtttattgctttcgcctataaatacgacggatcgtaatttgtcgttttatcaaaatgtactttcattttataataacgctgcggacatctacatttttgaattgaaaaaaaattggtaattactctttctttttctccatattgaccatcatactcattgctgatccatgtagatttcccggacatgaagccatttacaattgaatatatcctgccgccgctgccgctttgcacccggtggagcttgcatgttggtttctacgcagaactgagccggttaggcagataatttccattgagaactgagccatgtgcaccttccccccaacacggtgagcgacggggcaacggagtgatccacatgggacttttaaacatcatccgtcggatggcgttgcgagagaagcagtcgatccgtgagatcagccgacgcaccgggcaggcgcgcaacacgatcgcaaagtatttgaacgcaggtacaatcgagccgacgttcacgcggaacgaccaagcaagcttggctgccatttttggggtgaggccgttcgcggccgaggggcgcagcccctggggggatgggaggcccgcgttagcgggccgggagggttcgagaagggggggcaccccccttcggcgtgcgcggtcacgcgcacagggcgcagccctggttaaaaacaaggtttataaatattggtttaaaagcaggttaaaagacaggttagcggtggccgaaaaacgggcggaaacccttgcaaatgctggattttctgcctgtggacagcccctcaaatgtcaataggtgcgcccctcatctgtcagcactctgcccctcaagtgtcaaggatcgcgcccctcatctgtcagtagtcgcgcccctcaagtgtcaataccgcagggcacttatccccaggcttgtccacatcatctgtgggaaactcgcgtaaaatcaggcgttttcgccgatttgcgaggctggccagctccacgtcgccggccgaaatcgagcctgcccctcatctgtcaacgccgcgccgggtgagtcggcccctcaagtgtcaacgtccgcccctcatctgtcagtgagggccaagttttccgcgaggtatccacaacgccggcggccgcggtgtctcgcacacggcttcgacggcgtttctggcgcgtttgcagggccatagacggccgccagcccagcggcgagggcaaccagcccggtgagcgtcggaaagggtcgacggatcttttccgctgcataaccctgcttcggggtcattatagcgattttttcggtatatccatcctttttcgcacgatatacaggattttgccaaagggttcgtgtagactttccttggtgtatccaacggcgtcagccgggcaggataggtgaagtaggcccacccgcgagcgggtgttccttcttcactgtcccttattcgcacctggcggtgctcaacgggaatcctgctctgcgaggctggccggctaccgccggcgtaacagatgagggcaagcggatggctgatgaaaccaagccaaccaggaagggcagcccacctatcaaggtgtactgccttccagacgaacgaagagcgattgaggaaaaggcggcggcggccggcatgagcctgtcggcctacctgctggccgtcggccagggctacaaaatcacgggcgtcgtggactatgagcacgtccgcgagctggcccgcatcaatggcgacctgggccgcctgggcggcctgctgaaactctggctcaccgacgacccgcgcacggcgcggttcggtgatgccacgatcctcgccctgctggcgaagatcgaagagaagcaggacgagcttggcaaggtcatgatgggcgtggtccgcccgagggcagagccatgacttttttagccgctaaaacggccggggggtgcgcgtgattgccaagcacgtccccatgcgctccatcaagaagagcgacttcgcggagctggtattcgtgcagggcaagattcggaataccaagtacgagaaggacggccagacggtctacgggaccgacttcattgccgataaggtggattatctggacaccaaggcaccaggcgggtcaaatcaggaataagggcacattgccccggcgtgagtcggggcaatcccgcaaggagggtgaatgaatcggacgtttgaccggaaggcatacaggcaagaactgatcgacgcggggttttccgccgaggatgccgaaaccatcgcaagccgcaccgtcatgcgtgcgccccgcgaaaccttccagtccgtcggctcgatggtccagcaagctacggccaagatcgagcgcgacagcgtgcaactggctccccctgccctgcccgcgccatcggccgccgtggagcgttcgcgtcgtctcgaacaggaggcggcaggtttggcgaagtcgatgaccatcgacacgcgaggaactatgacgaccaagaagcgaaaaaccgccggcgaggacctggcaaaacaggtcagcgaggccaagcaggccgcgttgctgaaacacacgaagcagcagatcaaggaaatgcagctttccttgttcgatattgcgccgtggccggacacgatgcgagcgatgccaaacgacacggcccgctctgccctgttcaccacgcgcaacaagaaaatcccgcgcgaggcgctgcaaaacaaggtcattttccacgtcaacaaggacgtgaagatcacctacaccggcgtcgagctgcgggccgacgatgacgaactggtgtggcagcaggtgttggagtacgcgaagcgcacccctatcggcgagccgatcaccttcacgttctacgagctttgccaggacctgggctggtcgatcaatggccggtattacacgaaggccgaggaatgcctgtcgcgcctacaggcgacggcgatgggcttcacgtccgaccgcgttgggcacctggaatcggtgtcgctgctgcaccgcttccgcgtcctggaccgtggcaagaaaacgtcccgttgccaggtcctgatcgacgaggaaatcgtcgtgctgtttgctggcgaccactacacgaaattcatatgggagaagtaccgcaagctgtcgccgacggcccgacggatgttcgactatttcagctcgcaccgggagccgtacccgctcaagctggaaaccttccgcctcatgtgcggatcggattccacccgcgtgaagaagtggcgcgagcaggtcggcgaagcctgcgaagagttgcgaggcagcggcctggtggaacacgcctgggtcaatgatgacctggtgcattgcaaacgctagggccttgtggggtcagttccggctgggggttcagcagccagcgctttactggcatttcaggaacaagcgggcactgctcgacgcacttgcttcgctcagtatcgctcgggacgcacggcgcgctctacgaactgccgataaacagaggattaaaattgacaattgtgattaaggctcagattcgacggcttggagcggccgacgtgcaggatttccgcgagatccgattgtcggccctgaagaaagctccagagatgttcgggtccgtttacgagcacgaggagaaaaagcccatggaggcgttcgctgaacggttgcgagatgccgtggcattcggcgcctacatcgacggcgagatcattgggctgtcggtcttcaaacaggaggacggccccaaggacgctcacaaggcgcatctgtccggcgttttcgtggagcccgaacagcgaggccgaggggtcgccggtatgctgctgcgggcgttgccggcgggtttattgctcgtgatgatcgtccgacagattccaacgggaatctggtggatgcgcatcttcatcctcggcgcacttaatatttcgctattctggagcttgttgtttatttcggtctaccgcctgccgggcggggtcgcggcgacggtaggcgctgtgcagccgctgatggtcgtgttcatctctgccgctctgctaggtagcccgatacgattgatggcggtcctgggggctatttgcggaactgcgggcgtggcgctgttggtgttgacaccaaacgcagcgctagatcctgtcggcgtcgcagcgggcctggcgggggcggtttccatggcgttcggaaccgtgctgacccgcaagtggcaacctcccgtgcctctgctcacctttaccgcctggcaactggcggccggaggacttctgctcgttccagtagctttagtgtttgatccgccaatcccgatgcctacaggaaccaatgttctcggcctggcgtggctcggcctgatcggagcgggtttaacctacttcctttggttccgggggatctcgcgactcgaacctacagttgtttccttactgggctttctcagcccccgagcgcttagtgggaatttgtaccccttatcgaaccgggagcacaggatgacgcctaacaattcattcaagccgacaccgcttcgcggcgcggcttaattcaggagttaaacatcatgagggaagcggtgatcgccgaagtatcgactcaactatcagaggtagttggcgtcatcgagcgccatctcgaaccgacgttgctggccgtacatttgtacggctccgcagtggatggcggcctgaagccacacagtgatattgatttgctggttacggtgaccgtaaggcttgatgaaacaacgcggcgagctttgatcaacgaccttttggaaacttcggcttcccctggagagagcgagattctccgcgctgtagaagtcaccattgttgtgcacgacgacatcattccgtggcgttatccagctaagcgcgaactgcaatttggagaatggcagcgcaatgacattcttgcaggtatcttcgagccagccacgatcgacattgatctggctatcttgctgacaaaagcaagagaacatagcgttgccttggtaggtccagcggcggaggaactctttgatccggttcctgaacaggatctatttgaggcgctaaatgaaaccttaacgctatggaactcgccgcccgactgggctggcgatgagcgaaatgtagtgcttacgttgtcccgcatttggtacagcgcagtaaccggcaaaatcgcgccgaaggatgtcgctgccgactgggcaatggagcgcctgccggcccagtatcagcccgtcatacttgaagctaggcaggcttatcttggacaagaagatcgcttggcctcgcgcgcagatcagttggaagaatttgttcactacgtgaaaggcgagatcaccaaggtagtcggcaaataatgtctaacaattcgttcaagccgacgccgcttcgcggcgcggcttaactcaagcgttagagagctggggaagactatgcgcgatctgttgaaggtggttctaagcctcgtcttgcgatggcatttcgatccattcccattccgcgctcaagatggcttcccctcggcagttcatcagggctaaatcaatctagccgacttgtccggtgaaatgggctgcactccaacagaaacaatcaaacaaacatacacagcgacttattcacacgagctcaaattacaacggtatatatcctgccagtcagcatcatcacaccaaaagttaggcccgaatagtttgaaattagaaagctcgcaattgaggtctacaggccaaattcgctcttagccgtacaatattactcaccggatcctaaccggtttaattaaggcgcgccatgcccgggcaagcggccgcacaagtttgtacaaaaaagcaggcttctaggatctgcttttacatgcgagacacatcttctaaagtaattttaataatagttactatattcaagatttcatatatcaaatactcaatattacttctaaaaaattaattagatataattaaaatattacttttttaattttaagtttaattgttgaatttgtgactattgatttattattctactatgtttaaattgttttatagatagtttaaagtaaatataagtaatgtagtagagtgttagagtgttaccctaaaccataaactataagatttatggtggactaattttcatatatttcttattgcttttaccttttcttggtatgtaagtccgtaactggaattactgtgggttgccatgacactctgtggtcttttggttcatgcatggatcttgcgcaagaaaaagacaaagaacaaagaaaaaagacaaaacagagagacaaaacgcaatcacacaaccaactcaaattagtcactggctgatcaagatcgccgcgtccatgtatgtctaaatgccatgcaaagcaacacgtgcttaacatgcactttaaatggctcacccatctcaacccacacacaaacacattgcctttttcttcatcatcaccacaaccacctgtatatattcattctcttccgccacctcaatttcttcacttcaacacacgtcaacctgcatatgcgtgtcatcccatgcccaaatctccatgcatgttccaaccaccttctctcttatataatacctataaatacctctaatatcactcacttctttcatcatccatccatccagagtactactactctactactataataccccaacccaactcatattcaatactactctaggatccacaaccaaaaatggcagcgaggctgcaagagcagaaaggaggtgagatggacacgaggattgcgatcataggcatgagcgccatacttccttgtggaaccacggtgagagagtcatgggagaccataagggctggcattgattgcctgtctgatcttcctgaggatcgtgttgatgtgactgcgtactttgacccagtcaagaccacaaaggacaaaatctactgcaagagaggaggtttcattcctgagtatgactttgatgcgcgtgagtttggtctcaacatgttccagatggaagattctgatgcgaatcagaccatctcacttctcaaggtcaaagaagcacttcaagatgctgggattgatgcacttggaaaggagaagaaaaacataggatgcgtgcttggcattggaggtggacagaagagttcacatgagttctacagcagactcaactatgtggttgtggagaaagtcttgagaaagatggggatgccagaggaagatgtcaaagtggctgtggagaagtacaaagcgaacttcccagaatggagacttgactctttccctggattccttgggaatgtcactgctggcagatgcaccaacacattcaacttggatggcatgaactgcgttgtggatgctgcatgtgcaagctccttgatagcagtcaaggttgcgattgatgaactgctctatggtgactgcgacatgatggtcactggtgcaacctgcacagacaactccattgggatgtacatggctttctcaaagacacctgtgttcagcacggacccaagtgtgagagcgtatgatgagaaaacgaaagggatgctcattggtgagggatcagccatgttggtgctcaaacgttatgcagatgcagtgagggatggtgatgagattcatgctgtgattcgtggttgtgcaagctcaagtgatggcaaagcagctggcatctacactcccacaatcagtggtcaagaggaagccttgagacgtgcatacaatcgtgcctgcgttgaccctgccactgtcactttggttgagggtcatgggactggcactccagttggagataggattgagttgactgcgttgaggaacttgtttgacaaagcgtatggtgaagggaacacagagaaagttgcagttggaagtatcaagtccagtattggtcatttgaaggctgttgctggtcttgctggaatgatcaaggtcatcatggctctcaaacacaagactttgcctggaacgatcaatgtggacaatccacccaatctctatgacaacactcccatcaatgagtcatccctctacatcaacacgatgaacagaccctggttccctccacctggtgttccgagacgtgctggaatatccagctttggctttggaggtgccaactaccatgcagtgttggaagaggctgaaccagagcacacgacagcgtacagactcaacaaacgtccacaaccggtgttgatgatggctgcaactcctgctgcgttgcagagcctttgtgaagctcagctgaaagagtttgaagctgcgatcaaggagaatgagacagtcaagaatactgcctacatcaagtgtgtcaagtttggagaacagttcaagttccctgggagcatacctgcgaccaatgcgagactgggattcttggtcaaagatgcggaggatgcgtgctccacgcttcgtgctatatgtgctcagtttgccaaagatgtgaccaaagaagcgtggaggcttccgagagaaggagtttctttccgtgccaaaggcattgccaccaatggtgctgttgctgcactcttctctggacaaggtgctcagtacacacacatgttcagtgaagttgcgatgaactggcctcagttcagacagtccattgctgcaatggacgctgcacagtccaaggttgctggaagtgacaaagactttgaaagagtctctcaagtcctgtacccaaggaaaccgtacgaacgtgagccagaacaagatcacaagaaaatctcactcacagcatacagccagccgtcaaccctggcatgtgctcttggtgcctttgagattttcaaggaagctggattcactccagactttgcagctggacacagcttgggtgagtttgctgcgctctatgcagctggttgtgttgacagagatgagttgtttgaacttgtttgcagaagggcaaggatcatgggaggcaaagatgcacctgccacacccaaaggttgcatggcagctgtcataggacccaacgcagagaacatcaaggttcaagctgccaacgtctggcttggaaactcaaactctccgtctcagactgtcattactgggtctgttgaagggattcaagctgaaagtgccagattgcagaaggaagggttcagagttgtgcctcttgcttgtgagtctgccttccattctccacagatggaaaatgccagctcagctttcaaagatgtcatatccaaggtttccttccgtacacccaaagcagaaacaaagctcttcagcaatgtttctggagagacctatccgacggatgccagagagatgctcactcaacacatgacctcatctgtgaagttcctgacccaagtgaggaacatgcaccaagctggtgcgagaatctttgttgagtttggaccgaaacaagttctcagcaaacttgtttctgaaaccctcaaagatgacccgtctgttgtcacagtgtctgtgaacccagcttctggcacggactctgacatacagttgagggatgctgcagttcagctggttgtggctggtgtcaatcttcaagggtttgacaagtgggatgctcctgatgccacgaggatgcaagccatcaagaaaaagagaaccacactcagactttcagctgccacctatgtcagtgacaagaccaagaaagtgagggatgctgccatgaacgacggaagatgtgtcacatacctcaagggtgctgcaccactcatcaaggctcctgaacctgtggttgacgaagctgccaagagggaggctgaaaggcttcagaaggagcttcaagacgctcagaggcagcttgacgacgccaaacgtgcagctgcagaagccaactccaaacttgctgctgccaaggaggaagccaagactgctgcagcttcagccaagcctgcagttgacactgctgttgtggagaaacatcgtgccatcctcaagtccatgctggctgagctggatggttatggaagtgttgatgcttcttcccttcagcaacagcaacagcaacagactgctccggcgcctgttaaagccgctgcccctgccgctcccgttgcaagtgctcctgctcccgccgtgtccaacgagttgcttgagaaagctgagacagttgtgatggaggttctcgctgccaagactggatacgaaacagacatgattgaggcggacatggagcttgagactgagttgggaattgacagcatcaagagggttgaaattctttctgaagtccaagctatgcttaacgttgaggcgaaagatgttgatgctctctctaggacgagaacagtgggtgaagttgtcaacgctatgaaggcagaaatcgctggttcttccgctccggcgccggcagctgccgcacctgcaccggctaaagcggctccagctgcagctgcaccagctgtttctaatgagctgctcgaaaaggcagaaactgttgtgatggaagtccttgctgccaaaactggctacgaaactgacatgatagaatcagacatggagcttgagacggagcttggaattgattccatcaagcgtgtggaaatcctcagtgaagtccaagccatgctcaatgtggaagctaaggatgtggatgctctctcaaggaccagaactgtcggtgaggttgtcaatgccatgaaggctgagatagctggaggctccgctcctgcgccggccgctgccgctcctggtcccgctgccgcggctccagctccagctgcagccgctccggccgtctcaaacgaactccttgaaaaagctgagaccgtcgtgatggaggtcttggcagctaaaaccggctatgagactgacatgattgagtctgacatggaattggagacagaacttgggatagacagcatcaaacgtgttgaaatcctcagtgaggtccaagctatgctgaacgtggaagcgaaggatgttgatgctctgtccagaacgaggaccgttggtgaggttgtggatgccatgaaggctgaaattgctggagggtctgcgcccgcgccagctgcagccgctcctgcacccgcagccgcggcacctgctccagctgcacctgcacctgccgtttcttcagaactcttggagaaggctgagacggttgtgatggaggttttggctgcaaagactggctatgagaccgacatgattgaatctgatatggaattggagacagagcttgggatcgattccatcaaaagagtggagatcctgagtgaagtccaagccatgctcaatgttgaagctaaggatgttgatgcactttcaagaacaaggacagtgggtgaggttgtggatgccatgaaggcggagattgctggagggagcgcgcctgcgccagctgccgcggcacctgcaccggcagccgcagctccagctccagctgcaccagcaccggccgcgcccgcgccagctgtttcatccgaactcctggaaaaggccgagacggttgtgatggaggtgctcgcagctaagactggttacgagaccgacatgattgaaagtgacatggagcttgaaaccgagttgggaatagatagcatcaaacgtgttgaaatcttgtctgaggtccaagctatgttgaacgtggaggcaaaagatgtcgatgcgctttcaagaaccagaacagtcggtgaggtcgtggacgccatgaaggctgaaattgccggaagctctgctagtgcgccagctgcagccgcacctgcacctgctgccgcggcacctgctccagctgcagccgctcctgccgtcagcaatgagttgctggagaaagccgaaacagttgtgatggaagtccttgctgcaaaaactggttacgaaacggacatgattgagtcagacatggaattggagaccgaacttggaatagattccatcaagagagtggagatcctctctgaggtgcaagccatgctcaacgttgaggctaaagatgttgatgcactcagtaggacaagaactgtgggggaagttgtcgatgcgatgaaggctgagattgctggaggctctgctcctgcgccggcagctgccgcacctgcacccgcagccgcggcaccagctgtcagcaacgaattgcttgagaaggctgaaacagttgtcatggaagtgctggctgcaaaaaccggctatgagactgacatgattgagtctgacatggaacttgagacggaattgggcattgacagcatcaagcgtgttgagatcctcagtgaagtccaagcaatgctcaatgtggaggctaaggatgtggatgccctctcaaggaccagaacagttggtgaggtcgttgatgcgatgaaggcggagatcgctggaagttccgcgcctgcgccagctgcagccgctcctgcacccgcagccgcggcaccggctccagctgcagccgcaccggccgtctcctcagaactcctggaaaaggctgagacagttgtgatggaagtccttgctgcgaaaactggctatgagaccgacatgattgaatctgacatggaactggagaccgagcttggaattgactccatcaaacgtgttgaaatcctctctgaggttcaagcgatgttgaatgtggaggccaaagatgttgatgctctttccagaacaaggacggtgggagaggtggttgatgccatgaaggctgagatagctgggggttctgctcctgcgccagctgcagccgctcctgctcccgctgccgcggcaccagctgtcagcaacgaactccttgaaaaagctgaaactgttgtgatggaggttttggctgcaaagactggatacgagactgacatgatagagtcagacatggagttggaaacagagcttgggattgatagcatcaagcgtgtggaaatcctttctgaggttcaagccatgctgaacgttgaggccaaagatgtcgatgctttgtcaaggaccagaacggttggagaagtggtcgatgccatgaaggctgagatagctggtggatcagcccctgctccggctgcagccgctcctgcaagtgccggtgctgcaccagctgtgaagattgattcagttcatggtgctgactgtgacgatttgtcactgatgcacgcaaaggtggttgacatcagaaggccagatgaactgattctggaaagaccggagaaccgtccagttcttgtcgttgacgatggctcagagttgacacttgctcttgtgagggtgttgggagcctgtgcagttgtcttgacctttgagggattgcagttggctcagagagctggtgcagctgccattcgtcatgttctggctaaggacctttcagcagaatcagctgagaaggccatcaaagaggctgagcaaagatttggagcgttgggaggcttcataagccagcaagcagaaaggtttgaaccagctgagatactgggtttcacactcatgtgtgcgaagtttgccaaagcctctctctgcactgctgtggctggaggtcgtcctgccttcatcggtgtggctaggcttgacggcagacttggattcacctctcaaggcacttctgacgcactcaagagagcacagcgtggagcgatctttggactctgcaagacaatagggttggagtggtcagaatctgatgtgttcagccgtggtgtggacattgctcaagggatgcacccagaagatgctgcagttgccatagttagggagatggcgtgtgctgacatcagaatcagagaggttgggattggagcaaaccagcaaagatgcacaatcagagctgccaagttggagactgggaaccctcagagacagatagcgaaagacgatgtgcttctggtttctggaggtgctcgtgggatcacacctctttgcatccgtgagatcacgcgtcagattgctggaggcaagtacattctgttgggtcgtagcaaagtttctgcgtctgaaccagcatggtgtgctggcatcactgatgagaaggctgtgcagaaagctgccacccaagagttgaagagggccttcagtgctggtgaaggacccaaacccactccaagggctgtcacgaaacttgtgggatctgttcttggtgctcgtgaagtgagaagctccattgctgccattgaagctctgggtggcaaagcgatctacagctcttgtgatgtgaactctgctgcagatgttgccaaagcagttagggatgcagagtcccagcttggtgccagagttagtggaatcgttcacgcttctggtgtgctccgtgatcgtctcatagagaagaaactccctgacgagtttgatgctgtctttgggaccaaagtcactgggttggagaatcttctggctgcagttgatcgtgccaacctcaaacacatggttctcttcagctcccttgctggtttccacggcaatgttggtcagtctgactatgcgatggcaaacgaagctctcaacaagatgggtttggaacttgcgaaggatgtcagtgtcaagtccatctgctttggtccctgggatggtgggatggtgacacctcaactcaagaaacagtttcaagaaatgggagttcagatcattcctcgtgaaggaggtgctgatacagttgcgaggattgtgttgggatcaagtcctgctgagatccttgttggaaactggaggacaccatccaagaaagttggaagtgacacgatcaccctgcatagaaagatcagtgccaagtccaatcccttcttggaggatcatgtcatacaaggcagaagggtgttgccaatgacccttgctattgggagccttgctgagacctgccttggactcttccctggctactctctctgggccatagatgacgcacagctcttcaaaggtgtcactgttgatggagacgtcaactgtgaagtgaccctcacaccgtccactgctccgagtgggagggtgaatgtccaagcgacgctcaagacgttctcaagtggaaaacttgttccagcctacagagctgtcatagtgttgtccaaccaaggtgctccacctgccaatgcaaccatgcagcctccgagccttgatgcagatcctgctttgcaagggtcagtctatgatggcaagactctctttcatggtcctgcgttcagaggcattgatgacgttctcagctgcaccaagagccagcttgttgccaagtgttctgctgttcctggatcagatgcagccagaggagagtttgcaactgacactgatgcacatgatccctttgtcaatgatcttgcctttcaagcaatgttggtctgggtgaggagaacgctgggacaagctgcactcccgaactccattcagaggatagtccaacacagaccggtcccacaagacaaacccttctacatcaccctcagatccaatcagagtggtggacatagccagcacaaacatgcacttcagttccacaacgaacaaggtgatctcttcattgatgttcaagcctctgtcattgcgacagactcacttgcgttctgagtagttagcttaatcacttaggtcacctcgagtatcaaaatctatttagaaatacacaatattttgttgcaggcttgctggagaatcgatctgctatcataaaaattacaaaaaaattttatttgcctcaattattttaggattggtattaaggacgcttaaattatttgtcgggtcactacgcatcattgtgattgagaagatcagcgatacgaaatattcgtagtactatcgataatttatttgaaaattcataagaaaagcaaacgttacatgaattgatgaaacaatacaaagacagataaagccacgcacatttaggatattggccgagattactgaatattgagtaagatcacggaatttctgacaggagcatgtcttcaattcagcccaaatggcagttgaaatactcaaaccgccccatatgcaggagcggatcattcattgtttgtttggttgcctttgccaacatgggagtccaaggttggcgcgccgaattcgcggccgcttaattaagatgagtgatactcaggactcaggactcactctgctgatcactagtgctagcctcgaggtcgacacaactttgtatacaaaagttgtctaggatctgcttttacatgcgagacacatcttctaaagtaattttaataatagttactatattcaagatttcatatatcaaatactcaatattacttctaaaaaattaattagatataattaaaatattacttttttaattttaagtttaattgttgaatttgtgactattgatttattattctactatgtttaaattgttttatagatagtttaaagtaaatataagtaatgtagtagagtgttagagtgttaccctaaaccataaactataagatttatggtggactaattttcatatatttcttattgcttttaccttttcttggtatgtaagtccgtaactggaattactgtgggttgccatgacactctgtggtcttttggttcatgcatggatcttgcgcaagaaaaagacaaagaacaaagaaaaaagacaaaacagagagacaaaacgcaatcacacaaccaactcaaattagtcactggctgatcaagatcgccgcgtccatgtatgtctaaatgccatgcaaagcaacacgtgcttaacatgcactttaaatggctcacccatctcaacccacacacaaacacattgcctttttcttcatcatcaccacaaccacctgtatatattcattctcttccgccacctcaatttcttcacttcaacacacgtcaacctgcatatgcgtgtcatcccatgcccaaatctccatgcatgttccaaccaccttctctcttatataatacctataaatacctctaatatcactcacttctttcatcatccatccatccagagtactactactctactactataataccccaacccaactcatattcaatactactctaggatccacaaccaaaaatggctgcaaggaacgtgagtgcggctcatgagatgcatgacgagaagaggatagctgttgtgggcatggctgttcagtatgctggatgcaaaacgaaagacgagttctgggaagttctcatgaatggaaaagttgagagcaaagtgatcagcgacaaacgtcttggttcaaattaccgtgctgaacactacaaagctgaaaggagcaagtatgctgacaccttctgcaatgagacatatggaactcttgatgagaacgaaatagacaatgagcatgaactccttttgaaccttgccaaacaagccttggctgaaacatctgtcaaagattcaacaagatgtggcatagtttctggatgcctcagcttcccgatggacaacctccaaggtgaactcttgaatgtgtaccagaaccatgttgagaagaaacttggtgccagagttttcaaagatgcctctcactggtcagaaagagaacagtccaacaaaccagaggctggtgacagaagaatcttcatggaccctgcttcctttgttgctgaggaactcaatcttggcgctctccactactctgttgatgctgcctgtgccactgcgctctatgtgctcagactggcgcaagatcacttggtctctggtgcagctgatgtgatgctttgtggtgcaacatgcctgccggagccgtttttcatactctctgggttctcaaccttccaagccatgcctgttggaacgggtcagaatgtgtccatgccgctgcacaaagattctcaaggattgacccctggtgaaggaggttccatcatggtcctcaaacgtttggatgacgcaatcagagatggagatcacatctatggaacacttttgggagccaatgtcagcaacagtggcactggtctgccacttaaaccccttttgccgtcagagaaaaagtgcctcatggacacctacacacgtatcaatgtgcatccccacaagattcagtatgttgaatgccatgcaactgggactccacaaggtgatcgtgtggaaattgatgctgtgaaggcttgctttgaaggcaaagtcccacgttttggaaccacaaaagggaactttggacacacattggtggcagctgggtttgctggcatgtgcaaagtgcttctctccatgaagcacgggatcattccacccactccgggaatagatgacgaaacgaagatggaccctctggttgtctctggtgaggccattccctggccagaaacgaatggagaaccgaagcgtgctggtctctcagcgtttggatttggtgggaccaatgctcatgctgtctttgaggaacatgacccaagcaatgctgcatgcactggccatgactccatttctgctctctctgcacgttgtggtggtgagtcaaacatgagaatagcaatcactgggatggatgccacttttggtgctttgaaaggattggatgcttttgaaagggccatctacactggtgctcatggtgctataccactcccagaaaagagatggagattcctggggaaagacaaggacttccttgatctttgtggagtcaaagcaacaccgcatggctgttacattgaagatgttgaagttgatttccagaggctgaggactccaatgactcctgaagatatgctcttgcctcaacagcttctggctgtcaccacaattgatagggccatattggactctggcatgaagaaaggtggaaatgtggctgtctttgtggggttggggaccgatcttgaactctaccgtcaccgtgcaagggttgctctcaaggagagagtgaggcctgaagccagcaagaaactcaatgacatgatgcagtacatcaatgattgtgggacaagcacttcttacaccagctacataggcaacttggttgcaacaagggtcagttcacaatggggcttcacgggaccttccttcacaatcacagaaggcaacaattctgtgtacagatgtgctgaacttggcaaatacctcttggaaacgggagaggttgatggggttgtggttgcgggtgttgatctctgtgggagtgctgagaacctttacgtcaagtcaaggcgtttcaaggtgtctacatctgacaccccgagagccagctttgatgcagctgctgatggttactttgttggagagggctgtggtgcatttgtgctcaagcgtgagacaagctgcaccaaggatgacagaatctatgcttgcatggatgccatagttcctggaaatgttccatctgcatgtttgagagaggcattggatcaagccagagtcaagcctggagacatcgagatgttggagctttctgctgattcagcgaggcatttgaaggacccgtctgttctcccaaaggaactcactgctgaggaagagattggcggacttcagacgattcttcgtgacgatgacaagctcccaaggaatgttgcaactggaagtgtcaaggccactgttggtgacactggttatgcttctggtgctgccagtttgattaaggctgcgctttgcatctacaaccgttacctgcccagcaatggagatgactgggatgaacctgcacctgaagcaccctgggacagcacactctttgcgtgccagacctcaagagcttggttgaagaaccctggtgagagacgttatgcggctgtttccggagtcagtgaaaccagaagttgctacagtgtgctgctttctgaagcagagggacactacgagagagagaacagaatcagtttggatgaggaagcacccaagctcattgtgttgagagcagactcccatgaagagattcttggaagattggacaagataagggaaaggttcttgcagcccacgggtgctgcacccagagagtctgaattgaaggcgcaagcccgtaggatctttcttgaactccttggtgagacccttgcccaagatgcagcttcatctggaagtcagaagccccttgctctcagcttggtctccactccatccaagctccagagagaggtggaacttgcggcaaaaggcattccgagatgtctcaagatgagacgtgattggagttcccctgctggaagcagatatgcgcctgagcctttggccagtgacagagttgccttcatgtatggagaaggaaggagcccttactatggcatcacacaagacattcataggatttggcctgaacttcatgaggtcatcaatgagaaaacaaaccgtctctgggctgaaggtgacagatgggtcatgccaagggccagcttcaagagtgagcttgagtcacaacagcaagagtttgacagaaacatgattgaaatgttccgtcttggaatcctcacctcaattgccttcacaaacctggcgagagatgttctcaacatcacgcccaaagcagcctttggactcagtttgggagagatttccatgatctttgctttctccaagaaaaacggtttgataagcgatcagttgacaaaggatttgagagagtcagatgtctggaacaaagctctggctgttgagttcaatgcgctcagagaagcctggggcattccacagtctgtcccaaaagatgagttctggcaaggttacatagtgaggggaacgaaacaagacatagaagcagccatagcaccagactcaaagtatgtgaggttgaccatcatcaatgatgccaacactgctctcatcagtggaaagcctgatgcatgcaaagctgcgattgctcgtcttggtggcaacatccctgcgcttccagtcactcaaggcatgtgtgggcattgcccagaggtgggaccttacaccaaggacatcgcaaagatccacgccaaccttgagttccctgtggttgatggtcttgatctctggactaccataaaccagaagaggcttgtgccaagagccacgggtgccaaagatgaatgggctccttcatcctttggggagtatgctggacagctctatgagaaacaagccaacttccctcagatagttgaaaccatctacaagcagaactatgatgtgtttgttgaagttgggccaaacaatcacagaagcacagcagtgagaaccacgcttggaccacagagaaaccaccttgctggtgccatagacaagcagaacgaggatgcttggacgacaatagtcaagctcgtggcttcattgaaggctcaccttgttcctggagtgaccatcagtccgctctaccactccaagctcgttgcagaggctgaggcttgttatgctgcgctctgtaaaggtgagaaacccaagaaaaacaagtttgtgagaaagattcagttgaatggcagattcaacagcaaggcagaccccatctcctcagcagaccttgcatccttcccacctgcggaccctgcgattgaagctgccatctcttcaaggatcatgaagcctgtggctccgaaattctatgcgcgtctcaacattgatgagcaagatgagaccagagatccgatcttgaacaaggacaatgcgccttccagctccagctcttccagcagttcctcttccagcagttcatctccgtctcctgctccttcagctccagttcagaagaaagctgccccagctgcggagacaaaagctgttgccagtgctgatgcacttcgtagtgccctgcttgatcttgactccatgcttgcgctcagctctgcaagtgcttctggcaaccttgttgagactgcgccatctgatgccagtgtcattgtccctccgtgcaacattgctgatcttggcagcagagctttcatgaaaacttatggtgtttctgcgcctctgtacaccggtgcaatggccaagggaattgcctctgcggacttggtgatcgcagctggaaggcaaggaatccttgcgtcatttggtgctggaggccttccaatgcaagttgtgcgtgagtccattgaaaagattcaagctgccctgcccaatggaccatatgctgtcaacctcatccattctccttttgacagcaaccttgagaagggaaatgttgatctcttcttggaaaagggtgtcacttttgttgaggcttcagccttcatgacgttgacaccgcaagttgtcagatacagagcggctgggttgacgaggaatgcagatgggtcagtcaacataaggaacagaatcattgggaaagtctccagaactgagctggctgaaatgttcatgcgtcctgcacctgagcatcttttgcagaagctcattgcttctggggagatcaatcaagaacaagctgagttggccagacgtgttcctgtggctgatgacattgcggttgaagctgattctggtggacacactgacaaccgtccaatccatgtcattctgcctctgattatcaacctgagggataggcttcacagagagtgtggatacccagcaaacctgagggttcgtgttggtgctgggggtggcattgggtgtccccaagctgcgctggcaactttcaacatgggtgcctctttcattgtcactggaacagtgaaccaagttgccaaacaatctgggacgtgtgacaatgtgaggaaacagcttgcgaaagcaacttactcagatgtttgcatggcaccggcagctgacatgtttgaggaaggtgtgaaacttcaagttttgaagaaaggaacaatgttcccttcaagagccaacaaactctatgagttgttctgcaagtatgattcttttgagtccatgcctccagcagagcttgcgagggttgagaaaagaatcttcagtcgtgcattggaagaggtctgggatgagaccaagaacttctacatcaaccgtctccacaacccagagaagatacagagggctgagagggaccccaaactgaagatgtcactgtgtttcagatggtatctgtccctggcttcaaggtgggccaacactggagcttctgacagagtcatggactaccaagtttggtgtggtcctgccattggttcattcaatgatttcatcaaaggaacttaccttgatccggcagtggcaaatgagtacccgtgtgttgtgcagatcaacaaacagattcttagaggagcgtgcttcttgaggcgtcttgaaatactgagaaatgcaaggctttcagatggtgcagctgcacttgtggcgagcattgatgacacatatgtccctgctgagaagctgtgagtagttagcttaatcacttaggtcacctcgagtatcaaaatctatttagaaatacacaatattttgttgcaggcttgctggagaatcgatctgctatcataaaaattacaaaaaaattttatttgcctcaattattttaggattggtattaaggacgcttaaattatttgtcgggtcactacgcatcattgtgattgagaagatcagcgatacgaaatattcgtagtactatcgataatttatttgaaaattcataagaaaagcaaacgttacatgaattgatgaaacaatacaaagacagataaagccacgcacatttaggatattggccgagattactgaatattgagtaagatcacggaatttctgacaggagcatgtcttcaattcagcccaaatggcagttgaaatactcaaaccgccccatatgcaggagcggatcattcattgtttgtttggttgcctttgccaacatgggagtccaaggttggcgcgccgaattcgcggccgcttaattaatctgacctgaccactagacctgagtgagtacagatgtgctactagtgctagcctcgaggtcgaccaacttttctatacaaagttgtctaggatctgcttttacatgcgagacacatcttctaaagtaattttaataatagttactatattcaagatttcatatatcaaatactcaatattacttctaaaaaattaattagatataattaaaatattacttttttaattttaagtttaattgttgaatttgtgactattgatttattattctactatgtttaaattgttttatagatagtttaaagtaaatataagtaatgtagtagagtgttagagtgttaccctaaaccataaactataagatttatggtggactaattttcatatatttcttattgcttttaccttttcttggtatgtaagtccgtaactggaattactgtgggttgccatgacactctgtggtcttttggttcatgcatggatcttgcgcaagaaaaagacaaagaacaaagaaaaaagacaaaacagagagacaaaacgcaatcacacaaccaactcaaattagtcactggctgatcaagatcgccgcgtccatgtatgtctaaatgccatgcaaagcaacacgtgcttaacatgcactttaaatggctcacccatctcaacccacacacaaacacattgcctttttcttcatcatcaccacaaccacctgtatatattcattctcttccgccacctcaatttcttcacttcaacacacgtcaacctgcatatgcgtgtcatcccatgcccaaatctccatgcatgttccaaccaccttctctcttatataatacctataaatacctctaatatcactcacttctttcatcatccatccatccagagtactactactctactactataataccccaacccaactcatattcaatactactctaggatccacaaccaaaaatggcgcttcgtgtcaagaccaacaagaagccatgttgggagatgaccaaggaggaactgacctctggcaaaactgaggtgttcaactatgaggaactcctggagtttgcagagggtgacatagctaaggtttttggtccggagtttgctgtcatagacaagtaccccagaagggtgaggctgcctgctcgtgaatacctgcttgtgacaagggtcacactcatggatgccgaggtcaacaactacagagttggtgccagaatggtcactgagtatgatcttccagtgaatggcgaattgtctgagggaggtgattgtccctgggcagttctggttgagagtggacagtgcgatttgatgctgatatcatacatgggaattgatttccagaaccaaggtgacagagtttaccgtctgctcaacaccacgttgacattctatggggttgcccatgagggagagacccttgagtatgacatcagagtgaccggttttgccaaacgtttggatggtggcatctccatgttcttctttgagtatgactgctatgtcaatgggaggcttctcattgagatgagagatggctgtgctggcttcttcacaaatgaggagcttgatgcgggaaagggtgtggtgttcacaagaggggatttggctgccagagctaagattccaaagcaagatgtttctccctatgctgtcgctccctgccttcacaaaacaaaactcaacgaaaaggagatgcagaccttggttgacaaagattgggcttccgtttttggctcaaagaatggcatgccggagatcaactacaaactctgcgcacgtaagatgctcatgattgatagagtcaccagcattgaccataagggaggtgtgtacggtttgggtcagttggttggtgagaaaatcttggagagggaccattggtacttcccatgccattttgttaaggatcaagtcatggctggatctcttgtcagcgacggttgttcacaaatgctcaagatgtacatgatctggctcggtttgcaccttaccaccggaccatttgacttcagacccgtcaacggacacccgaacaaagttaggtgtaggggtcagatatctcctcataagggaaagttggtctacgtcatggagatcaaagagatgggattcgacgaggataacgatccgtacgccattgctgacgtcaacatcattgacgttgatttcgaaaagggtcaagatttcagccttgatagaatcagcgactacggaaagggggatcttaacaaaaagatcgtcgtggacttcaagggcattgctctcaagatgcagaagagatccacgaacaagaacccctccaaagttcagcccgtttttgctaacggtgcagccactgtgggaccggaagcgtccaaggccagctctggtgccagtgctagtgcttctgctgcccctgcgaagcctgctttctcagcagatgttcttgcgccaaagccagttgcacttcctgaacatatcctcaagggtgacgctctcgctccgaaagaaatgtcctggcatcccatgtcaaaacttcctggcaacccgacgccgttcttctcccctagttcttaccctccgagggcaatttgcttcatccctttccctggcaacccacttgacaacaattgcaaagctggagaaatgcctctgaactggtacaacatgtcagagttcatgtgtggaaaagttagcaactgcttgggaccagagttcgcaagatttgataagtcaaatacgagcagaagccctgcttttgatttggctcttgtgactagagttgttgaagtcacaaacatggaacatggcaagttcctgaatgttgattgcaatcccagcaaaggcacaatggtgggggagtttgactgtcctcaagatgcgtggttctttgatggttcttgcaatgatgggcacatgccttattccatcatcatggaaatcggacttcagacatccggtgttctcaccagtgtgttgaaagcaccactgacgatggacaaagatgacattctctttaggaaccttgatgcaagtgctgaaatggtgaggccagatgtggatgtgagggggaaaaccataaggaatgtgaccaagtgcactggatatgcaatgttgggaaagatggggattcacagattcacgtttgagttgtctgttgatggcgtggttttctacaaaggaagcacttcctttggatggttcactccagaggtgtttgctcagcaagctggacttgacaatgggaaaaagacggagccttggtgcaaaactaacaacacgagtgtgagaagagttgaaatcgcatcagccaaaggcaaagaacagctgactgagaaacttccagatgcaactaatgctcaagttctcagaaggtcagaacagtgtgagtatttggattacctcaacattgctcctgattctgggctgcatgggaaaggatatgcgcatggacacaaagatgttaacccacaagactggttcttctcttgtcacttttggtttgatcctgtgatgcctggatctttgggaattgagtcaatgttccagctcattgaggcatttgcggtggaccagaacataccgggagaatacaatgtgagcaatccgacctttgcccatgcccctggaaaaacggcgtggaagtaccgtggtcaattgacaccaaagaaccgtgcgatggactgtgaggtgcacatagtttcaatcacagcctctcctgaaaatggaggctacgttgacatagtggcagatggagcactttgggttgatggtctccgtgtgtatgaagccaaagaactcagagttcgtgttgtcagtgcaaaacctcaagccattccggatgttcaacaacagccacccagcgcaaaagcggaccctgggaaaactggagttgcactcagtccgactcagttgagagatgtcctgcttgaagtggacaatccattgtatcttggtgttgaaaactccaatttggtgcagtttgaatccaaacctgcaacttcttcaaggattgtcagtatcaaaccatgctccataagtgatcttggtgacaagtccttcatggaaacgtacaatgtgtcagcacctctgtacactggagcaatggccaagggaattgcgtctgcggaccttgtcattgctgctgggaagaggaagatattgggttcttttggagcgggtgggcttccaatgcaccatgtgagggcagctttggagaagatacaagcggctctgcctcaaggaccatatgctgtgaacctcattcattcaccttttgacagcaacttggaaaaggggaatgttgatctcttcctcgaaaagggcgttactgtggtggaggcttctgcattcatgaccctcactccccaagttgttcgttaccgtgcagccggactctcaaggaacgctgatgggagtgtcaacatcagaaaccgtatcattggaaaagtgtccagaacagaactcgccgaaatgttcatcagaccggctccggaacacctccttgagaaactcatagcttctggtgagataacacaagaacaagccgaacttgcccgtcgtgttcctgtcgcagacgacatcgctgttgaagctgattctggtggtcacactgacaaccgtcccatccacgtcatcttgcctttgatcatcaaccttaggaacagactgcacagagagtgtggttatcctgcgcaccttagagtcagagttggagctggaggcggtgttggctgcccacaagctgctgcggctgccctcacaatgggagctgccttcatagtgactgggactgtcaatcaagttgctaaacagtccgggacatgtgacaacgtgagaaaacaactcagtcaagccacctacagtgacatttgcatggctccagcagctgatatgtttgaggaaggtgtgaaactccaagttctcaagaagggaacaatgttcccatcaagagctaacaaattgtacgaactcttttgcaagtacgactctttcgattcaatgcctcctgctgaacttgaaaggatcgagaagaggatcttcaagagggcacttcaagaggtctgggaagagaccaaggacttttacatcaatggtttgaagaatccagagaagatacagagagcggaacatgaccccaaactcaagatgtctttgtgtttcagatggtatcttggtcttgcatcacgttgggccaacatgggtgctcctgatcgtgtcatggactatcaagtctggtgtggtccagccattggagccttcaatgacttcatcaaaggaacatatcttgatcctgctgtctctaatgagtacccatgtgttgtccagatcaaccttcagattttgcgtggtgcatgttacctgaggcgtcttaatgctctgagaaatgatccgaggattgatcttgagactgaagatgctgcctttgtctatgagccaacgaatgcgctttgagtagttagcttaatcacttaggtcacctcgagtatcaaaatctatttagaaatacacaatattttgttgcaggcttgctggagaatcgatctgctatcataaaaattacaaaaaaattttatttgcctcaattattttaggattggtattaaggacgcttaaattatttgtcgggtcactacgcatcattgtgattgagaagatcagcgatacgaaatattcgtagtactatcgataatttatttgaaaattcataagaaaagcaaacgttacatgaattgatgaaacaatacaaagacagataaagccacgcacatttaggatattggccgagattactgaatattgagtaagatcacggaatttctgacaggagcatgtcttcaattcagcccaaatggcagttgaaatactcaaaccgccccatatgcaggagcggatcattcattgtttgtttggttgcctttgccaacatgggagtccaaggttggcgcgccgaattcgcggccgcttaattaatcacgagtggatgactgtcacgactgactcatgactgactactagtgctagcctcgaggtcgacacaactttgtataataaagttgtctagacctaggatctgcttttacatgcgagacacatcttctaaagtaattttaataatagttactatattcaagatttcatatatcaaatactcaatattacttctaaaaaattaattagatataattaaaatattacttttttaattttaagtttaattgttgaatttgtgactattgatttattattctactatgtttaaattgttttatagatagtttaaagtaaatataagtaatgtagtagagtgttagagtgttaccctaaaccataaactataagatttatggtggactaattttcatatatttcttattgcttttaccttttcttggtatgtaagtccgtaactggaattactgtgggttgccatgacactctgtggtcttttggttcatgcatggatcttgcgcaagaaaaagacaaagaacaaagaaaaaagacaaaacagagagacaaaacgcaatcacacaaccaactcaaattagtcactggctgatcaagatcgccgcgtccatgtatgtctaaatgccatgcaaagcaacacgtgcttaacatgcactttaaatggctcacccatctcaacccacacacaaacacattgcctttttcttcatcatcaccacaaccacctgtatatattcattctcttccgccacctcaatttcttcacttcaacacacgtcaacctgcatatgcgtgtcatcccatgcccaaatctccatgcatgttccaaccaccttctctcttatataatacctataaatacctctaatatcactcacttctttcatcatccatccatccagagtactactactctactactataataccccaacccaactcatattcaatactactctaggatccacaaccaaaaatgcccactccagatgccactgcgcctctcaacaagccgtcagactatgctgtgtaccacgaagaggatggtcctttctggactgctgattcctctggtgtcagcagagtgaacttctctgaaactggtgtgggatctgaaggtgtcattcctgcgctcacactgattgatgtgtttgagcgtgcggtcaaacgtggtggcaataggattgcattcagaacagagaacatgccaaccttgaggcgtggagaagaggctcctgatgctttgccgctcaaagattggaagtcctggtcttggaaacagtacaaagctgatgttcacagaattgcgagggctctgatggatttgggagttgagcagcacgatgcggtctccatctttggcttcaactcaccagaatggttcctcagtgctgtcggtgcagttcatgctggtgccaagatcgctggaatctacccttcagacactcctgctcaagtgcagtacaaagccttccactctgacactgctgttgcagttgtggagaacgaacagtgcttcaagaaattcgcagaggtggttgaggatctcccttacctcaaagccattgtttgttgggattatgaagccacagacatcacaagggaagatggttcagtggttgaagtcctgacctttgctgagttcctgaagagaggtgacactgtggaagcagctgcacttgatgagagaatcagcaagattgagcccaccatgtgtgctgccctgatctacaccagtggcacaactgggagacccaaagctgtcatgatctcccatgacaaccttgtctttgaagcatctgctgtggtcccgaacttgggaggggcatgcacgaccactgctgaggaaaggattctttcctaccttcctttgtctcatgttgctggaatgatggttgacatcattgctccaatcatagcgacagcgttccacaaaggaaggatctgtgtttgttttgccagaccgtatgatttgagaactggaacccttgggcaaagactcaatgcagtggagccaaccatattccttggtgtgccacgtgtgtgggaaaagatccaagagaaattgatggctgttggtgccaaaaccactggtctcaagaagaaactcagcacggcagccaagaaacgtgggcttgaatttcaagaggaacaacagatagggagaagtggtgccaaccctggctttggaccgcttggaatctacaagaaacttttgggcctcatcaaaggaaagttggggctgaccaaatgcaagtttgcctttgctggcgcagctccaatgacccgtgaaacccttcagtactttggagcgctgaacatcaacatcaatgaggtctatggaatgtctgaatgcagtggggctgccacctggtcaactgacaaagctcatgagtggggcactgttggctatgagatgccctcctgtgaagtcagagtgttcaagattgcggaggatggcaccaagacagagtgcccaagagctgctgacatcatgcatgccacagaagaggaacaaggtgaagtttgcttccgtggaaggaacatcatgatgggatacttggccaacccgaaacttggtgatgaccatgttgctgagattgaagagaagaatgcagctgccatagatagcgaagggtggcttcactctggtgacaagggagcaatttccacaaggggaatgctcaagataacgggcagatacaaggagcttatcataggtgctggtggggagaatgtggctcctgttcccattgaagatgccatcaaggcgaggatgccttttgtttcaaatgcaatgatggttggagacaagaggaagttcatggctgtccttctgactttgaaaacggttggagcaactggagagcttcctggcacaaacaagctcatgggagcagctgcggactatggtgagaccattgaggatgcctgtgacaatgaggcgctcattgaagagataacgcagcaactcaaagagataggtgacgatggagatgtcacgccaagcaatgcagcccgtatacaaaagttcacgattttgccactcgacttcagtgtctccacagatgaactgacagcaacgttgaaattgaagagaagtgtggttgcagacaagtatgaggacatcatagaggctttctatgagagcaagtctgtctttgtgccttactcaacagttggagcttatgcaacgggtggaccagttgatgactctgttgtggatggatcattcaaaggtgactttagcatgattggggatgacgatccggatcttcagaatgtggatgtccttgaagcaattgatgaggacaactgagtagttagcttaatcacttaggtcacctcgagtatcaaaatctatttagaaatacacaatattttgttgcaggcttgctggagaatcgatctgctatcataaaaattacaaaaaaattttatttgcctcaattattttaggattggtattaaggacgcttaaattatttgtcgggtcactacgcatcattgtgattgagaagatcagcgatacgaaatattcgtagtactatcgataatttatttgaaaattcataagaaaagcaaacgttacatgaattgatgaaacaatacaaagacagataaagccacgcacatttaggatattggccgagattactgaatattgagtaagatcacggaatttctgacaggagcatgtcttcaattcagcccaaatggcagttgaaatactcaaaccgccccatatgcaggagcggatcattcattgtttgtttggttgcctttgccaacatgggagtccaaggttggcgcgccgaattcgcggccgcttaattaatctgatcatggatgctacgtcacggcagtacaggactatcactagacctaggatctgcttttacatgcgagacacatcttctaaagtaattttaataatagttactatattcaagatttcatatatcaaatactcaatattacttctaaaaaattaattagatataattaaaatattacttttttaattttaagtttaattgttgaatttgtgactattgatttattattctactatgtttaaattgttttatagatagtttaaagtaaatataagtaatgtagtagagtgttagagtgttaccctaaaccataaactataagatttatggtggactaattttcatatatttcttattgcttttaccttttcttggtatgtaagtccgtaactggaattactgtgggttgccatgacactctgtggtcttttggttcatgcatggatcttgcgcaagaaaaagacaaagaacaaagaaaaaagacaaaacagagagacaaaacgcaatcacacaaccaactcaaattagtcactggctgatcaagatcgccgcgtccatgtatgtctaaatgccatgcaaagcaacacgtgcttaacatgcactttaaatggctcacccatctcaacccacacacaaacacattgcctttttcttcatcatcaccacaaccacctgtatatattcattctcttccgccacctcaatttcttcacttcaacacacgtcaacctgcatatgcgtgtcatcccatgcccaaatctccatgcatgttccaaccaccttctctcttatataatacctataaatacctctaatatcactcacttctttcatcatccatccatccagagtactactactctactactataataccccaacccaactcatattcaatactactctaggatccacaaccaaaaatgcttcagcacacttggcttccgaagcctcccaatctgaccctcttgtcagatgaggttcatctctggaggattcctcttgaccagcctgagtcacaacttcaagaccttgctgccaccctgagcagtgatgaattggcgagggcaaacagattctactttccagaacacagaaggcgtttcactgctgggagaggcatcctcagatccatcttgggtggatacttgggagtggaaccgggtcaagtcaagtttgattatgagtcccgtgggaaaccgatccttggtgacagatttgctgagagtggactcctgttcaacttgtctcacagccagaaccttgccttgtgtgctgtcaactacacgcgtcaaataggcattgatcttgaatatctgcgtccaacatctgacttggagtctcttgcaaagaggttctttctcccaagagaatatgaactcttgaggtcactccctgatgagcagaaacagaagattttctttcgttactggacttgcaaagaggcttatctcaaagcaacgggagatggaatagccaaacttgaagagatcgagatagcactcaccccaacagaacctgccaagctccaaacagctcctgcgtggtctctgttggagcttgtgccagatgacaattgtgttgcagctgtggctgttgcgggttttggttggcagcccaagttctggcattactgagtagttagcttaatcacttaggtcacctcgagtatcaaaatctatttagaaatacacaatattttgttgcaggcttgctggagaatcgatctgctatcataaaaattacaaaaaaattttatttgcctcaattattttaggattggtattaaggacgcttaaattatttgtcgggtcactacgcatcattgtgattgagaagatcagcgatacgaaatattcgtagtactatcgataatttatttgaaaattcataagaaaagcaaacgttacatgaattgatgaaacaatacaaagacagataaagccacgcacatttaggatattggccgagattactgaatattgagtaagatcacggaatttctgacaggagcatgtcttcaattcagcccaaatggcagttgaaatactcaaaccgccccatatgcaggagcggatcattcattgtttgtttggttgcctttgccaacatgggagtccaaggttggcgcgccgaattcgcggccgcttaattaactactgtcactgaggccgtagacgagtacggactgatctaactagtgctagcctcgaggtcgacacccagcttt

SEQ ID NO: 51 - DNA, 36936 bp, Artificial sequence
  plasmid pDAB7733
gatctgcttttacatgcgagacacatcttctaaagtaattttaataatagttactatattcaagatttcatatatcaaatactcaatattacttctaaaaaattaattagatataattaaaatattacttttttaattttaagtttaattgttgaatttgtgactattgatttattattctactatgtttaaattgttttatagatagtttaaagtaaatataagtaatgtagtagagtgttagagtgttaccctaaaccataaactataagatttatggtggactaattttcatatatttcttattgcttttaccttttcttggtatgtaagtccgtaactggaattactgtgggttgccatgacactctgtggtcttttggttcatgcatggatcttgcgcaagaaaaagacaaagaacaaagaaaaaagacaaaacagagagacaaaacgcaatcacacaaccaactcaaattagtcactggctgatcaagatcgccgcgtccatgtatgtctaaatgccatgcaaagcaacacgtgcttaacatgcactttaaatggctcacccatctcaacccacacacaaacacattgcctttttcttcatcatcaccacaaccacctgtatatattcattctcttccgccacctcaatttcttcacttcaacacacgtcaacctgcatatgcgtgtcatcccatgcccaaatctccatgcatgttccaaccaccttctctcttatataatacctataaatacctctaatatcactcacttctttcatcatccatccatccagagtactactactctactactataataccccaacccaactcatattcaatactactctaggatccacaaccaaaaatggcagcgaggctgcaagagcagaaaggaggtgagatggacacgaggattgcgatcataggcatgagcgccatacttccttgtggaaccacggtgagagagtcatgggagaccataagggctggcattgattgcctgtctgatcttcctgaggatcgtgttgatgtgactgcgtactttgacccagtcaagaccacaaaggacaaaatctactgcaagagaggaggtttcattcctgagtatgactttgatgcgcgtgagtttggtctcaacatgttccagatggaagattctgatgcgaatcagaccatctcacttctcaaggtcaaagaagcacttcaagatgctgggattgatgcacttggaaaggagaagaaaaacataggatgcgtgcttggcattggaggtggacagaagagttcacatgagttctacagcagactcaactatgtggttgtggagaaagtcttgagaaagatggggatgccagaggaagatgtcaaagtggctgtggagaagtacaaagcgaacttcccagaatggagacttgactctttccctggattccttgggaatgtcactgctggcagatgcaccaacacattcaacttggatggcatgaactgcgttgtggatgctgcatgtgcaagctccttgatagcagtcaaggttgcgattgatgaactgctctatggtgactgcgacatgatggtcactggtgcaacctgcacagacaactccattgggatgtacatggctttctcaaagacacctgtgttcagcacggacccaagtgtgagagcgtatgatgagaaaacgaaagggatgctcattggtgagggatcagccatgttggtgctcaaacgttatgcagatgcagtgagggatggtgatgagattcatgctgtgattcgtggttgtgcaagctcaagtgatggcaaagcagctggcatctacactcccacaatcagtggtcaagaggaagccttgagacgtgcatacaatcgtgcctgcgttgaccctgccactgtcactttggttgagggtcatgggactggcactccagttggagataggattgagttgactgcgttgaggaacttgtttgacaaagcgtatggtgaagggaacacagagaaagttgcagttggaagtatcaagtccagtattggtcatttgaaggctgttgctggtcttgctggaatgatcaaggtcatcatggctctcaaacacaagactttgcctggaacgatcaatgtggacaatccacccaatctctatgacaacactcccatcaatgagtcatccctctacatcaacacgatgaacagaccctggttccctccacctggtgttccgagacgtgctggaatatccagctttggctttggaggtgccaactaccatgcagtgttggaagaggctgaaccagagcacacgacagcgtacagactcaacaaacgtccacaaccggtgttgatgatggctgcaactcctgctgcgttgcagagcctttgtgaagctcagctgaaagagtttgaagctgcgatcaaggagaatgagacagtcaagaatactgcctacatcaagtgtgtcaagtttggagaacagttcaagttccctgggagcatacctgcgaccaatgcgagactgggattcttggtcaaagatgcggaggatgcgtgctccacgcttcgtgctatatgtgctcagtttgccaaagatgtgaccaaagaagcgtggaggcttccgagagaaggagtttctttccgtgccaaaggcattgccaccaatggtgctgttgctgcactcttctctggacaaggtgctcagtacacacacatgttcagtgaagttgcgatgaactggcctcagttcagacagtccattgctgcaatggacgctgcacagtccaaggttgctggaagtgacaaagactttgaaagagtctctcaagtcctgtacccaaggaaaccgtacgaacgtgagccagaacaagatcacaagaaaatctcactcacagcatacagccagccgtcaaccctggcatgtgctcttggtgcctttgagattttcaaggaagctggattcactccagactttgcagctggacacagcttgggtgagtttgctgcgctctatgcagctggttgtgttgacagagatgagttgtttgaacttgtttgcagaagggcaaggatcatgggaggcaaagatgcacctgccacacccaaaggttgcatggcagctgtcataggacccaacgcagagaacatcaaggttcaagctgccaacgtctggcttggaaactcaaactctccgtctcagactgtcattactgggtctgttgaagggattcaagctgaaagtgccagattgcagaaggaagggttcagagttgtgcctcttgcttgtgagtctgccttccattctccacagatggaaaatgccagctcagctttcaaagatgtcatatccaaggtttccttccgtacacccaaagcagaaacaaagctcttcagcaatgtttctggagagacctatccgacggatgccagagagatgctcactcaacacatgacctcatctgtgaagttcctgacccaagtgaggaacatgcaccaagctggtgcgagaatctttgttgagtttggaccgaaacaagttctcagcaaacttgtttctgaaaccctcaaagatgacccgtctgttgtcacagtgtctgtgaacccagcttctggcacggactctgacatacagttgagggatgctgcagttcagctggttgtggctggtgtcaatcttcaagggtttgacaagtgggatgctcctgatgccacgaggatgcaagccatcaagaaaaagagaaccacactcagactttcagctgccacctatgtcagtgacaagaccaagaaagtgagggatgctgccatgaacgacggaagatgtgtcacatacctcaagggtgctgcaccactcatcaaggctcctgaacctgtggttgacgaagctgccaagagggaggctgaaaggcttcagaaggagcttcaagacgctcagaggcagcttgacgacgccaaacgtgcagctgcagaagccaactccaaacttgctgctgccaaggaggaagccaagactgctgcagcttcagccaagcctgcagttgacactgctgttgtggagaaacatcgtgccatcctcaagtccatgctggctgagctggatggttatggaagtgttgatgcttcttcccttcagcaacagcaacagcaacagactgctccggcgcctgttaaagccgctgcccctgccgctcccgttgcaagtgctcctgctcccgccgtgtccaacgagttgcttgagaaagctgagacagttgtgatggaggttctcgctgccaagactggatacgaaacagacatgattgaggcggacatggagcttgagactgagttgggaattgacagcatcaagagggttgaaattctttctgaagtccaagctatgcttaacgttgaggcgaaagatgttgatgctctctctaggacgagaacagtgggtgaagttgtcaacgctatgaaggcagaaatcgctggttcttccgctccggcgccggcagctgccgcacctgcaccggctaaagcggctccagctgcagctgcaccagctgtttctaatgagctgctcgaaaaggcagaaactgttgtgatggaagtccttgctgccaaaactggctacgaaactgacatgatagaatcagacatggagcttgagacggagcttggaattgattccatcaagcgtgtggaaatcctcagtgaagtccaagccatgctcaatgtggaagctaaggatgtggatgctctctcaaggaccagaactgtcggtgaggttgtcaatgccatgaaggctgagatagctggaggctccgctcctgcgccggccgctgccgctcctggtcccgctgccgcggctccagctccagctgcagccgctccggccgtctcaaacgaactccttgaaaaagctgagaccgtcgtgatggaggtcttggcagctaaaaccggctatgagactgacatgattgagtctgacatggaattggagacagaacttgggatagacagcatcaaacgtgttgaaatcctcagtgaggtccaagctatgctgaacgtggaagcgaaggatgttgatgctctgtccagaacgaggaccgttggtgaggttgtggatgccatgaaggctgaaattgctggagggtctgcgcccgcgccagctgcagccgctcctgcacccgcagccgcggcacctgctccagctgcacctgcacctgccgtttcttcagaactcttggagaaggctgagacggttgtgatggaggttttggctgcaaagactggctatgagaccgacatgattgaatctgatatggaattggagacagagcttgggatcgattccatcaaaagagtggagatcctgagtgaagtccaagccatgctcaatgttgaagctaaggatgttgatgcactttcaagaacaaggacagtgggtgaggttgtggatgccatgaaggcggagattgctggagggagcgcgcctgcgccagctgccgcggcacctgcaccggcagccgcagctccagctccagctgcaccagcaccggccgcgcccgcgccagctgtttcatccgaactcctggaaaaggccgagacggttgtgatggaggtgctcgcagctaagactggttacgagaccgacatgattgaaagtgacatggagcttgaaaccgagttgggaatagatagcatcaaacgtgttgaaatcttgtctgaggtccaagctatgttgaacgtggaggcaaaagatgtcgatgcgctttcaagaaccagaacagtcggtgaggtcgtggacgccatgaaggctgaaattgccggaagctctgctagtgcgccagctgcagccgcacctgcacctgctgccgcggcacctgctccagctgcagccgctcctgccgtcagcaatgagttgctggagaaagccgaaacagttgtgatggaagtccttgctgcaaaaactggttacgaaacggacatgattgagtcagacatggaattggagaccgaacttggaatagattccatcaagagagtggagatcctctctgaggtgcaagccatgctcaacgttgaggctaaagatgttgatgcactcagtaggacaagaactgtgggggaagttgtcgatgcgatgaaggctgagattgctggaggctctgctcctgcgccggcagctgccgcacctgcacccgcagccgcggcaccagctgtcagcaacgaattgcttgagaaggctgaaacagttgtcatggaagtgctggctgcaaaaaccggctatgagactgacatgattgagtctgacatggaacttgagacggaattgggcattgacagcatcaagcgtgttgagatcctcagtgaagtccaagcaatgctcaatgtggaggctaaggatgtggatgccctctcaaggaccagaacagttggtgaggtcgttgatgcgatgaaggcggagatcgctggaagttccgcgcctgcgccagctgcagccgctcctgcacccgcagccgcggcaccggctccagctgcagccgcaccggccgtctcctcagaactcctggaaaaggctgagacagttgtgatggaagtccttgctgcgaaaactggctatgagaccgacatgattgaatctgacatggaactggagaccgagcttggaattgactccatcaaacgtgttgaaatcctctctgaggttcaagcgatgttgaatgtggaggccaaagatgttgatgctctttccagaacaaggacggtgggagaggtggttgatgccatgaaggctgagatagctgggggttctgctcctgcgccagctgcagccgctcctgctcccgctgccgcggcaccagctgtcagcaacgaactccttgaaaaagctgaaactgttgtgatggaggttttggctgcaaagactggatacgagactgacatgatagagtcagacatggagttggaaacagagcttgggattgatagcatcaagcgtgtggaaatcctttctgaggttcaagccatgctgaacgttgaggccaaagatgtcgatgctttgtcaaggaccagaacggttggagaagtggtcgatgccatgaaggctgagatagctggtggatcagcccctgctccggctgcagccgctcctgcaagtgccggtgctgcaccagctgtgaagattgattcagttcatggtgctgactgtgacgatttgtcactgatgcacgcaaaggtggttgacatcagaaggccagatgaactgattctggaaagaccggagaaccgtccagttcttgtcgttgacgatggctcagagttgacacttgctcttgtgagggtgttgggagcctgtgcagttgtcttgacctttgagggattgcagttggctcagagagctggtgcagctgccattcgtcatgttctggctaaggacctttcagcagaatcagctgagaaggccatcaaagaggctgagcaaagatttggagcgttgggaggcttcataagccagcaagcagaaaggtttgaaccagctgagatactgggtttcacactcatgtgtgcgaagtttgccaaagcctctctctgcactgctgtggctggaggtcgtcctgccttcatcggtgtggctaggcttgacggcagacttggattcacctctcaaggcacttctgacgcactcaagagagcacagcgtggagcgatctttggactctgcaagacaatagggttggagtggtcagaatctgatgtgttcagccgtggtgtggacattgctcaagggatgcacccagaagatgctgcagttgccatagttagggagatggcgtgtgctgacatcagaatcagagaggttgggattggagcaaaccagcaaagatgcacaatcagagctgccaagttggagactgggaaccctcagagacagatagcgaaagacgatgtgcttctggtttctggaggtgctcgtgggatcacacctctttgcatccgtgagatcacgcgtcagattgctggaggcaagtacattctgttgggtcgtagcaaagtttctgcgtctgaaccagcatggtgtgctggcatcactgatgagaaggctgtgcagaaagctgccacccaagagttgaagagggccttcagtgctggtgaaggacccaaacccactccaagggctgtcacgaaacttgtgggatctgttcttggtgctcgtgaagtgagaagctccattgctgccattgaagctctgggtggcaaagcgatctacagctcttgtgatgtgaactctgctgcagatgttgccaaagcagttagggatgcagagtcccagcttggtgccagagttagtggaatcgttcacgcttctggtgtgctccgtgatcgtctcatagagaagaaactccctgacgagtttgatgctgtctttgggaccaaagtcactgggttggagaatcttctggctgcagttgatcgtgccaacctcaaacacatggttctcttcagctcccttgctggtttccacggcaatgttggtcagtctgactatgcgatggcaaacgaagctctcaacaagatgggtttggaacttgcgaaggatgtcagtgtcaagtccatctgctttggtccctgggatggtgggatggtgacacctcaactcaagaaacagtttcaagaaatgggagttcagatcattcctcgtgaaggaggtgctgatacagttgcgaggattgtgttgggatcaagtcctgctgagatccttgttggaaactggaggacaccatccaagaaagttggaagtgacacgatcaccctgcatagaaagatcagtgccaagtccaatcccttcttggaggatcatgtcatacaaggcagaagggtgttgccaatgacccttgctattgggagccttgctgagacctgccttggactcttccctggctactctctctgggccatagatgacgcacagctcttcaaaggtgtcactgttgatggagacgtcaactgtgaagtgaccctcacaccgtccactgctccgagtgggagggtgaatgtccaagcgacgctcaagacgttctcaagtggaaaacttgttccagcctacagagctgtcatagtgttgtccaaccaaggtgctccacctgccaatgcaaccatgcagcctccgagccttgatgcagatcctgctttgcaagggtcagtctatgatggcaagactctctttcatggtcctgcgttcagaggcattgatgacgttctcagctgcaccaagagccagcttgttgccaagtgttctgctgttcctggatcagatgcagccagaggagagtttgcaactgacactgatgcacatgatccctttgtcaatgatcttgcctttcaagcaatgttggtctgggtgaggagaacgctgggacaagctgcactcccgaactccattcagaggatagtccaacacagaccggtcccacaagacaaacccttctacatcaccctcagatccaatcagagtggtggacatagccagcacaaacatgcacttcagttccacaacgaacaaggtgatctcttcattgatgttcaagcctctgtcattgcgacagactcacttgcgttctgagtagttagcttaatcacttaggtcacctcgagtatcaaaatctatttagaaatacacaatattttgttgcaggcttgctggagaatcgatctgctatcataaaaattacaaaaaaattttatttgcctcaattattttaggattggtattaaggacgcttaaattatttgtcgggtcactacgcatcattgtgattgagaagatcagcgatacgaaatattcgtagtactatcgataatttatttgaaaattcataagaaaagcaaacgttacatgaattgatgaaacaatacaaagacagataaagccacgcacatttaggatattggccgagattactgaatattgagtaagatcacggaatttctgacaggagcatgtcttcaattcagcccaaatggcagttgaaatactcaaaccgccccatatgcaggagcggatcattcattgtttgtttggttgcctttgccaacatgggagtccaaggttggcgcgccgaattcgcggccgcttaattaagatgagtgatactcaggactcaggactcactctgctgatcactagtgctagcctcgaggtcgacacaactttgtatacaaaagttgtctagacctaggttaattaagcggccgcagcttatttctcttttcgatactctaattgagccgtgcgctctatctagaccaattagaattgatggagctctaaaggttgctggctgttttcttgttcatatgattaacttctaaacttgtgtataaatattctctgaaagtgcttcttttggcatatgtaggttgggcaaaaacgaggaagattgcttctcaatttggaagatgatgaacagccgaagaagaaaataagaataggcagtcctgctactcaatggatctcagtctataacggtcgtcgtcccatgaaacagaggtaacacattttttgcatatacactttgatagttcctcactaactgtgtaatcttttggtagatatcactacaatgttggagagacaaggctgcgccagcatatacagaagggaaatgaagatggccttttgattagctgtgtagcatcagcagctaatctctgggctctcatcatggatgctggaactggattcacttctcaagtttatgagttgtcaccggtcttcctacacaaggtaataatcagttgaagcaattaagaatcaatctgatttgtagtaaactaagaagaacttaccttatgatttccccgcaggactggattatggaacaatgggaaaagaactactatataagctccatagcgggttcagataacgggagctctttagttgttatgtcaaaaggttagtgtttagtgaataataaacttattatcaaaaagtcttcattgacttatttatatacttgttgtgaattggtaggaactacttattctcagcagtcatacaaagtgagtgactcatttccattcaagtggataaataagaaatggaaagaagattttcatgtaacctccatgacaactgctggtaatcgttggggtgtggtaatgtcgaggaactctggcttctctgatcaggtaggtttttgtctcttattgtctggtgtttttattttcccctgatagtctaatatgataaactctgcgttgtgaaaggtggtggagcttgactttttgtacccaagcgatgggatacataggaggtgggagaatgggtatagaataacatcaatggcagcaactgcggatcaagcagctttcatattaagcataccaaagcgtaagatggtggatgaaactcaagagactctccgcaccaccgcctttccaagtactcatgtcaaggttggtttctttagctttgaacacagatttggatctttttgttttgtttccatatacataggacctgagagcttttggttgaattttttttttttcaggacaaatgggcgaagaatctgtacattgcatcaatatgctatggcaggacagtgtgctgatgatacacacttaagcatcatgtgttgtgttagaaagccgaagacaattggagcgagcctcagggtcgtcataataccaatcaaagacgtaaaaccagacgcagtctctttggttgaatgtgatgaaagggatgtgtcttggtatgtatgtacgagtaacaaaagagaagatgcaattgagtagtagaaagatttgagagctttttaaagcccttcaagtgtgtgcttttatcttattgatatcatccatttgcgttgtttaatgcgtctttagatatgtttctgtttctttctcagtgtctgaatatctgataagtgcaatgtgagaaagccacaccaaaccaaaatattcaaatcttatatttttaataatgtcgaatcactcggagttgccaccttctgtgccaattgtgctgaatctatcacactaaaaaaaacatttcttcaaggtaatgacttgtggactatgttctgaattctcattaagtttttattttttgaagtttaagtttttaccttcttttttgaaaaatatcgttcataagatgtcacgccaggacatgagctacacatcacatattagcatgcagatgcggacgatttgtcactcacttcaaacacctaaaagagcttctctctcacagcacacacacatatgcatgcaatatttacacgtgatcgccatgcaaatctccattctcacctataaattagaggctcggcttcactttttactcaaaccaaaactcatcactacaagatccacaaccaaaaatggctgcaaggaacgtgagtgcggctcatgagatgcatgacgagaagaggatagctgttgtgggcatggctgttcagtatgctggatgcaaaacgaaagacgagttctgggaagttctcatgaatggaaaagttgagagcaaagtgatcagcgacaaacgtcttggttcaaattaccgtgctgaacactacaaagctgaaaggagcaagtatgctgacaccttctgcaatgagacatatggaactcttgatgagaacgaaatagacaatgagcatgaactccttttgaaccttgccaaacaagccttggctgaaacatctgtcaaagattcaacaagatgtggcatagtttctggatgcctcagcttcccgatggacaacctccaaggtgaactcttgaatgtgtaccagaaccatgttgagaagaaacttggtgccagagttttcaaagatgcctctcactggtcagaaagagaacagtccaacaaaccagaggctggtgacagaagaatcttcatggaccctgcttcctttgttgctgaggaactcaatcttggcgctctccactactctgttgatgctgcctgtgccactgcgctctatgtgctcagactggcgcaagatcacttggtctctggtgcagctgatgtgatgctttgtggtgcaacatgcctgccggagccgtttttcatactctctgggttctcaaccttccaagccatgcctgttggaacgggtcagaatgtgtccatgccgctgcacaaagattctcaaggattgacccctggtgaaggaggttccatcatggtcctcaaacgtttggatgacgcaatcagagatggagatcacatctatggaacacttttgggagccaatgtcagcaacagtggcactggtctgccacttaaaccccttttgccgtcagagaaaaagtgcctcatggacacctacacacgtatcaatgtgcatccccacaagattcagtatgttgaatgccatgcaactgggactccacaaggtgatcgtgtggaaattgatgctgtgaaggcttgctttgaaggcaaagtcccacgttttggaaccacaaaagggaactttggacacacattggtggcagctgggtttgctggcatgtgcaaagtgcttctctccatgaagcacgggatcattccacccactccgggaatagatgacgaaacgaagatggaccctctggttgtctctggtgaggccattccctggccagaaacgaatggagaaccgaagcgtgctggtctctcagcgtttggatttggtgggaccaatgctcatgctgtctttgaggaacatgacccaagcaatgctgcatgcactggccatgactccatttctgctctctctgcacgttgtggtggtgagtcaaacatgagaatagcaatcactgggatggatgccacttttggtgctttgaaaggattggatgcttttgaaagggccatctacactggtgctcatggtgctataccactcccagaaaagagatggagattcctggggaaagacaaggacttccttgatctttgtggagtcaaagcaacaccgcatggctgttacattgaagatgttgaagttgatttccagaggctgaggactccaatgactcctgaagatatgctcttgcctcaacagcttctggctgtcaccacaattgatagggccatattggactctggcatgaagaaaggtggaaatgtggctgtctttgtggggttggggaccgatcttgaactctaccgtcaccgtgcaagggttgctctcaaggagagagtgaggcctgaagccagcaagaaactcaatgacatgatgcagtacatcaatgattgtgggacaagcacttcttacaccagctacataggcaacttggttgcaacaagggtcagttcacaatggggcttcacgggaccttccttcacaatcacagaaggcaacaattctgtgtacagatgtgctgaacttggcaaatacctcttggaaacgggagaggttgatggggttgtggttgcgggtgttgatctctgtgggagtgctgagaacctttacgtcaagtcaaggcgtttcaaggtgtctacatctgacaccccgagagccagctttgatgcagctgctgatggttactttgttggagagggctgtggtgcatttgtgctcaagcgtgagacaagctgcaccaaggatgacagaatctatgcttgcatggatgccatagttcctggaaatgttccatctgcatgtttgagagaggcattggatcaagccagagtcaagcctggagacatcgagatgttggagctttctgctgattcagcgaggcatttgaaggacccgtctgttctcccaaaggaactcactgctgaggaagagattggcggacttcagacgattcttcgtgacgatgacaagctcccaaggaatgttgcaactggaagtgtcaaggccactgttggtgacactggttatgcttctggtgctgccagtttgattaaggctgcgctttgcatctacaaccgttacctgcccagcaatggagatgactgggatgaacctgcacctgaagcaccctgggacagcacactctttgcgtgccagacctcaagagcttggttgaagaaccctggtgagagacgttatgcggctgtttccggagtcagtgaaaccagaagttgctacagtgtgctgctttctgaagcagagggacactacgagagagagaacagaatcagtttggatgaggaagcacccaagctcattgtgttgagagcagactcccatgaagagattcttggaagattggacaagataagggaaaggttcttgcagcccacgggtgctgcacccagagagtctgaattgaaggcgcaagcccgtaggatctttcttgaactccttggtgagacccttgcccaagatgcagcttcatctggaagtcagaagccccttgctctcagcttggtctccactccatccaagctccagagagaggtggaacttgcggcaaaaggcattccgagatgtctcaagatgagacgtgattggagttcccctgctggaagcagatatgcgcctgagcctttggccagtgacagagttgccttcatgtatggagaaggaaggagcccttactatggcatcacacaagacattcataggatttggcctgaacttcatgaggtcatcaatgagaaaacaaaccgtctctgggctgaaggtgacagatgggtcatgccaagggccagcttcaagagtgagcttgagtcacaacagcaagagtttgacagaaacatgattgaaatgttccgtcttggaatcctcacctcaattgccttcacaaacctggcgagagatgttctcaacatcacgcccaaagcagcctttggactcagtttgggagagatttccatgatctttgctttctccaagaaaaacggtttgataagcgatcagttgacaaaggatttgagagagtcagatgtctggaacaaagctctggctgttgagttcaatgcgctcagagaagcctggggcattccacagtctgtcccaaaagatgagttctggcaaggttacatagtgaggggaacgaaacaagacatagaagcagccatagcaccagactcaaagtatgtgaggttgaccatcatcaatgatgccaacactgctctcatcagtggaaagcctgatgcatgcaaagctgcgattgctcgtcttggtggcaacatccctgcgcttccagtcactcaaggcatgtgtgggcattgcccagaggtgggaccttacaccaaggacatcgcaaagatccacgccaaccttgagttccctgtggttgatggtcttgatctctggactaccataaaccagaagaggcttgtgccaagagccacgggtgccaaagatgaatgggctccttcatcctttggggagtatgctggacagctctatgagaaacaagccaacttccctcagatagttgaaaccatctacaagcagaactatgatgtgtttgttgaagttgggccaaacaatcacagaagcacagcagtgagaaccacgcttggaccacagagaaaccaccttgctggtgccatagacaagcagaacgaggatgcttggacgacaatagtcaagctcgtggcttcattgaaggctcaccttgttcctggagtgaccatcagtccgctctaccactccaagctcgttgcagaggctgaggcttgttatgctgcgctctgtaaaggtgagaaacccaagaaaaacaagtttgtgagaaagattcagttgaatggcagattcaacagcaaggcagaccccatctcctcagcagaccttgcatccttcccacctgcggaccctgcgattgaagctgccatctcttcaaggatcatgaagcctgtggctccgaaattctatgcgcgtctcaacattgatgagcaagatgagaccagagatccgatcttgaacaaggacaatgcgccttccagctccagctcttccagcagttcctcttccagcagttcatctccgtctcctgctccttcagctccagttcagaagaaagctgccccagctgcggagacaaaagctgttgccagtgctgatgcacttcgtagtgccctgcttgatcttgactccatgcttgcgctcagctctgcaagtgcttctggcaaccttgttgagactgcgccatctgatgccagtgtcattgtccctccgtgcaacattgctgatcttggcagcagagctttcatgaaaacttatggtgtttctgcgcctctgtacaccggtgcaatggccaagggaattgcctctgcggacttggtgatcgcagctggaaggcaaggaatccttgcgtcatttggtgctggaggccttccaatgcaagttgtgcgtgagtccattgaaaagattcaagctgccctgcccaatggaccatatgctgtcaacctcatccattctccttttgacagcaaccttgagaagggaaatgttgatctcttcttggaaaagggtgtcacttttgttgaggcttcagccttcatgacgttgacaccgcaagttgtcagatacagagcggctgggttgacgaggaatgcagatgggtcagtcaacataaggaacagaatcattgggaaagtctccagaactgagctggctgaaatgttcatgcgtcctgcacctgagcatcttttgcagaagctcattgcttctggggagatcaatcaagaacaagctgagttggccagacgtgttcctgtggctgatgacattgcggttgaagctgattctggtggacacactgacaaccgtccaatccatgtcattctgcctctgattatcaacctgagggataggcttcacagagagtgtggatacccagcaaacctgagggttcgtgttggtgctgggggtggcattgggtgtccccaagctgcgctggcaactttcaacatgggtgcctctttcattgtcactggaacagtgaaccaagttgccaaacaatctgggacgtgtgacaatgtgaggaaacagcttgcgaaagcaacttactcagatgtttgcatggcaccggcagctgacatgtttgaggaaggtgtgaaacttcaagttttgaagaaaggaacaatgttcccttcaagagccaacaaactctatgagttgttctgcaagtatgattcttttgagtccatgcctccagcagagcttgcgagggttgagaaaagaatcttcagtcgtgcattggaagaggtctgggatgagaccaagaacttctacatcaaccgtctccacaacccagagaagatacagagggctgagagggaccccaaactgaagatgtcactgtgtttcagatggtatctgtccctggcttcaaggtgggccaacactggagcttctgacagagtcatggactaccaagtttggtgtggtcctgccattggttcattcaatgatttcatcaaaggaacttaccttgatccggcagtggcaaatgagtacccgtgtgttgtgcagatcaacaaacagattcttagaggagcgtgcttcttgaggcgtcttgaaatactgagaaatgcaaggctttcagatggtgcagctgcacttgtggcgagcattgatgacacatatgtccctgctgagaagctgtgagtagttagcttaatcacttaggtcaccattccaaacgaaatatcctcgagagtgtgtataccacggtgatatgagtgtggttgttgatgtatgttaacactacatagtcatggtgtgtgttccataaataatgtactaatgtaataagaactactccgtagacggtaataaaagagaagtttttttttttactcttgctactttcctataaagtgatgattaacaacagatacaccaaaaagaaaacaattaatctatattcacaatgaagcagtactagtctattgaacatgtcagattttctttttctagatgtctaatcaagccttcaaggctagtgataaaagatcatccaatgggatccaacaaagactcaaatctggttttgatcagatacttcgaaactatttttgtatgcactaaattatgcaagtgttcttttatttggtgaagactctttagaagcaaagaacgataagcagtaataaaaaaaataaagttcagttttaagatttgttattgacttagcggccgcttaattaaactagtgctagcctcgaggtcgaccaacttttctatacaaagttgtctagacctaggactaggcactgagtgactcactgacctgactgagtgactggcggccgcagcttatagtaaagatttttttgttaataaaatgaaagttaatatttatggatttatttgaacatatttacaagtttttgttaataaatttatttacagaagtgttaaatttgaaaatgtgttaaatgagagttaatatttatggatataatattactttatttaaaaataaaatgaatttatattaaaatatgatttggtaaaagatattataaagaggaacttggatgagaaagacgacgatgggcaaaagttgcatggcacaccgcttttgttcagtaacatctgcactgtggcgcctttttcacactcaccatgcatgctgccacgtcagctttcacactatgacaccactggccatacacgttgccacctcagctttctcctcttctcactatgacacgactggccatgcatgcatgcatgctgccacctcagctcccgcctcttcacccgtgtctttctctcatgtcgcagtgctgcgtgccaacctcttctctctataaatagagagaagagaatgatggttaaactcaaaccaaaacaagaaaacatacacaaatagcaaaacggatccacaaccaaaaatggcgcttcgtgtcaagaccaacaagaagccatgttgggagatgaccaaggaggaactgacctctggcaaaactgaggtgttcaactatgaggaactcctggagtttgcagagggtgacatagctaaggtttttggtccggagtttgctgtcatagacaagtaccccagaagggtgaggctgcctgctcgtgaatacctgcttgtgacaagggtcacactcatggatgccgaggtcaacaactacagagttggtgccagaatggtcactgagtatgatcttccagtgaatggcgaattgtctgagggaggtgattgtccctgggcagttctggttgagagtggacagtgcgatttgatgctgatatcatacatgggaattgatttccagaaccaaggtgacagagtttaccgtctgctcaacaccacgttgacattctatggggttgcccatgagggagagacccttgagtatgacatcagagtgaccggttttgccaaacgtttggatggtggcatctccatgttcttctttgagtatgactgctatgtcaatgggaggcttctcattgagatgagagatggctgtgctggcttcttcacaaatgaggagcttgatgcgggaaagggtgtggtgttcacaagaggggatttggctgccagagctaagattccaaagcaagatgtttctccctatgctgtcgctccctgccttcacaaaacaaaactcaacgaaaaggagatgcagaccttggttgacaaagattgggcttccgtttttggctcaaagaatggcatgccggagatcaactacaaactctgcgcacgtaagatgctcatgattgatagagtcaccagcattgaccataagggaggtgtgtacggtttgggtcagttggttggtgagaaaatcttggagagggaccattggtacttcccatgccattttgttaaggatcaagtcatggctggatctcttgtcagcgacggttgttcacaaatgctcaagatgtacatgatctggctcggtttgcaccttaccaccggaccatttgacttcagacccgtcaacggacacccgaacaaagttaggtgtaggggtcagatatctcctcataagggaaagttggtctacgtcatggagatcaaagagatgggattcgacgaggataacgatccgtacgccattgctgacgtcaacatcattgacgttgatttcgaaaagggtcaagatttcagccttgatagaatcagcgactacggaaagggggatcttaacaaaaagatcgtcgtggacttcaagggcattgctctcaagatgcagaagagatccacgaacaagaacccctccaaagttcagcccgtttttgctaacggtgcagccactgtgggaccggaagcgtccaaggccagctctggtgccagtgctagtgcttctgctgcccctgcgaagcctgctttctcagcagatgttcttgcgccaaagccagttgcacttcctgaacatatcctcaagggtgacgctctcgctccgaaagaaatgtcctggcatcccatgtcaaaacttcctggcaacccgacgccgttcttctcccctagttcttaccctccgagggcaatttgcttcatccctttccctggcaacccacttgacaacaattgcaaagctggagaaatgcctctgaactggtacaacatgtcagagttcatgtgtggaaaagttagcaactgcttgggaccagagttcgcaagatttgataagtcaaatacgagcagaagccctgcttttgatttggctcttgtgactagagttgttgaagtcacaaacatggaacatggcaagttcctgaatgttgattgcaatcccagcaaaggcacaatggtgggggagtttgactgtcctcaagatgcgtggttctttgatggttcttgcaatgatgggcacatgccttattccatcatcatggaaatcggacttcagacatccggtgttctcaccagtgtgttgaaagcaccactgacgatggacaaagatgacattctctttaggaaccttgatgcaagtgctgaaatggtgaggccagatgtggatgtgagggggaaaaccataaggaatgtgaccaagtgcactggatatgcaatgttgggaaagatggggattcacagattcacgtttgagttgtctgttgatggcgtggttttctacaaaggaagcacttcctttggatggttcactccagaggtgtttgctcagcaagctggacttgacaatgggaaaaagacggagccttggtgcaaaactaacaacacgagtgtgagaagagttgaaatcgcatcagccaaaggcaaagaacagctgactgagaaacttccagatgcaactaatgctcaagttctcagaaggtcagaacagtgtgagtatttggattacctcaacattgctcctgattctgggctgcatgggaaaggatatgcgcatggacacaaagatgttaacccacaagactggttcttctcttgtcacttttggtttgatcctgtgatgcctggatctttgggaattgagtcaatgttccagctcattgaggcatttgcggtggaccagaacataccgggagaatacaatgtgagcaatccgacctttgcccatgcccctggaaaaacggcgtggaagtaccgtggtcaattgacaccaaagaaccgtgcgatggactgtgaggtgcacatagtttcaatcacagcctctcctgaaaatggaggctacgttgacatagtggcagatggagcactttgggttgatggtctccgtgtgtatgaagccaaagaactcagagttcgtgttgtcagtgcaaaacctcaagccattccggatgttcaacaacagccacccagcgcaaaagcggaccctgggaaaactggagttgcactcagtccgactcagttgagagatgtcctgcttgaagtggacaatccattgtatcttggtgttgaaaactccaatttggtgcagtttgaatccaaacctgcaacttcttcaaggattgtcagtatcaaaccatgctccataagtgatcttggtgacaagtccttcatggaaacgtacaatgtgtcagcacctctgtacactggagcaatggccaagggaattgcgtctgcggaccttgtcattgctgctgggaagaggaagatattgggttcttttggagcgggtgggcttccaatgcaccatgtgagggcagctttggagaagatacaagcggctctgcctcaaggaccatatgctgtgaacctcattcattcaccttttgacagcaacttggaaaaggggaatgttgatctcttcctcgaaaagggcgttactgtggtggaggcttctgcattcatgaccctcactccccaagttgttcgttaccgtgcagccggactctcaaggaacgctgatgggagtgtcaacatcagaaaccgtatcattggaaaagtgtccagaacagaactcgccgaaatgttcatcagaccggctccggaacacctccttgagaaactcatagcttctggtgagataacacaagaacaagccgaacttgcccgtcgtgttcctgtcgcagacgacatcgctgttgaagctgattctggtggtcacactgacaaccgtcccatccacgtcatcttgcctttgatcatcaaccttaggaacagactgcacagagagtgtggttatcctgcgcaccttagagtcagagttggagctggaggcggtgttggctgcccacaagctgctgcggctgccctcacaatgggagctgccttcatagtgactgggactgtcaatcaagttgctaaacagtccgggacatgtgacaacgtgagaaaacaactcagtcaagccacctacagtgacatttgcatggctccagcagctgatatgtttgaggaaggtgtgaaactccaagttctcaagaagggaacaatgttcccatcaagagctaacaaattgtacgaactcttttgcaagtacgactctttcgattcaatgcctcctgctgaacttgaaaggatcgagaagaggatcttcaagagggcacttcaagaggtctgggaagagaccaaggacttttacatcaatggtttgaagaatccagagaagatacagagagcggaacatgaccccaaactcaagatgtctttgtgtttcagatggtatcttggtcttgcatcacgttgggccaacatgggtgctcctgatcgtgtcatggactatcaagtctggtgtggtccagccattggagccttcaatgacttcatcaaaggaacatatcttgatcctgctgtctctaatgagtacccatgtgttgtccagatcaaccttcagattttgcgtggtgcatgttacctgaggcgtcttaatgctctgagaaatgatccgaggattgatcttgagactgaagatgctgcctttgtctatgagccaacgaatgcgctttgagtagttagcttaatcacttaggtcacccagtccaagcccggcctagcacgatgatcatgagtgttgctattgatgtatgttaatactatacacagtcatcgtgtgtgttttataaaactgtaagcttaggatgtttgaggctaatgtaattagcactacaccgtaataaatgagaggtttactttatgttttaataatgttcttacccttgctgctctctaaactgtaatggcgtacggttagctaaactaaagtaaaaatcgattcgcttgagtaaaattagtgaccgggaaagatcatcgactactactgctcagagatgtaatcggtaattaagacttcaagctcaataattaattaggagtaaatctggcttcgaatttttaaattgtcaacttccaaagaaggattggcaagactcaatctcaattgcccaacaaacatatggctctttacaaatttggaatctctttttgatggcaagaacgtcgtaattcctctgtcgatctcatgtaattaccaaactcatctacttattactttctttatatgcacttactgatgcggccgcttaattaatcacgagtggatgactgtcacgactgactcatgactgactactagtgctagcctcgaggtcgacacaactttgtataataaagttgtctagtctgcttttacatgcgagacacatcttctaaagtaattttaataatagttactatattcaagatttcatatatcaaatactcaatattacttctaaaaaattaattagatataattaaaatattacttttttaattttaagtttaattgttgaatttgtgactattgatttattattctactatgtttaaattgttttatagatagtttaaagtaaatataagtaatgtagtagagtgttagagtgttaccctaaaccataaactataagatttatggtggactaattttcatatatttcttattgcttttaccttttcttggtatgtaagtccgtaactggaattactgtgggttgccatgacactctgtggtcttttggttcatgcatggatcttgcgcaagaaaaagacaaagaacaaagaaaaaagacaaaacagagagacaaaacgcaatcacacaaccaactcaaattagtcactggctgatcaagatcgccgcgtccatgtatgtctaaatgccatgcaaagcaacacgtgcttaacatgcactttaaatggctcacccatctcaacccacacacaaacacattgcctttttcttcatcatcaccacaaccacctgtatatattcattctcttccgccacctcaatttcttcacttcaacacacgtcaacctgcatatgcgtgtcatcccatgcccaaatctccatgcatgttccaaccaccttctctcttatataatacctataaatacctctaatatcactcacttctttcatcatccatccatccagagtactactactctactactataataccccaacccaactcatattcaatactactctaggatccacaaccaaaaatgcttcagcacacttggcttccgaagcctcccaatctgaccctcttgtcagatgaggttcatctctggaggattcctcttgaccagcctgagtcacaacttcaagaccttgctgccaccctgagcagtgatgaattggcgagggcaaacagattctactttccagaacacagaaggcgtttcactgctgggagaggcatcctcagatccatcttgggtggatacttgggagtggaaccgggtcaagtcaagtttgattatgagtcccgtgggaaaccgatccttggtgacagatttgctgagagtggactcctgttcaacttgtctcacagccagaaccttgccttgtgtgctgtcaactacacgcgtcaaataggcattgatcttgaatatctgcgtccaacatctgacttggagtctcttgcaaagaggttctttctcccaagagaatatgaactcttgaggtcactccctgatgagcagaaacagaagattttctttcgttactggacttgcaaagaggcttatctcaaagcaacgggagatggaatagccaaacttgaagagatcgagatagcactcaccccaacagaacctgccaagctccaaacagctcctgcgtggtctctgttggagcttgtgccagatgacaattgtgttgcagctgtggctgttgcgggttttggttggcagcccaagttctggcattactgagtagttagcttaatcacttaggtcacctcgagtatcaaaatctatttagaaatacacaatattttgttgcaggcttgctggagaatcgatctgctatcataaaaattacaaaaaaattttatttgcctcaattattttaggattggtattaaggacgcttaaattatttgtcgggtcactacgcatcattgtgattgagaagatcagcgatacgaaatattcgtagtactatcgataatttatttgaaaattcataagaaaagcaaacgttacatgaattgatgaaacaatacaaagacagataaagccacgcacatttaggatattggccgagattactgaatattgagtaagatcacggaatttctgacaggagcatgtcttcaattcagcccaaatggcagttgaaatactcaaaccgccccatatgcaggagcggatcattcattgtttgtttggttgcctttgccaacatgggagtccaaggttggcgcgccgaattcgcggccgcttaattaactactgtcactgaggccgtagacgagtacggactgatctaactagtgctagcctcgaggtcgacacccagctttcttgtacaaagtggttgcggccgcttaattaaatttaaattcaattaatgcaatcttgattttcaacaacgaaggtaatggcgtaaaagaaaaaatgtatgttattgtattgatctttcatgatgttgaagcgtgccataatatgatgatgtataattaaaatattaactgtcgcattttattgaaatggcactgttatttcaaccatatctttgattctgttacatgacacgactgcaagaagtaaataatagacgccgttgttaaagaattgctatcatatgtgcctaactagagggaatttgagcgtcagacctaatcaaatattacaaaatatctcactctgtcgccagcaatggtgtaatcagcgcagacaaatggcgtaaagatcgcggaaaaacctccccgagtggcatgatagctgcctctgtattgctgatttagtcagccttatttgacttaagggtgccctcgttagtgacaaattgctttcaaggagacagccatgccccacactttgttgaaaaacaaattgcctttggggagacggtaaagccagttgctcttcaataaggaatgtcgaggaggcaatgtaaccgcctctggtagtacacttctctaatccaaaaatcaatttgtattcaagataccgcaaaaaacttatggtttaaaccctgcaggactagtccagaaggtaattatccaagatgtagcatcaagaatccaatgtttacgggaaaaactatggaagtattatgtaagctcagcaagaagcagatcaatatgcggcacatatgcaacctatgttcaaaaatgaagaatgtacagatacaagatcctatactgccagaatacgaagaagaatacgtagaaattgaaaaagaagaaccaggcgaagaaaagaatcttgaagacgtaagcactgacgacaacaatgaaaagaagaagataaggtcggtgattgtgaaagagacatagaggacacatgtaaggtggaaaatgtaagggcggaaagtaaccttatcacaaaggaatcttatcccccactacttatccttttatatttttccgtgtcatttttgcccttgagttttcctatataaggaaccaagttcggcatttgtgaaaacaagaaaaaatttggtgtaagctattttctttgaagtactgaggatacaacttcagagaaatttgtaagtttgtaggtaccagatctggatcccaaaccatgtctccggagaggagaccagttgagattaggccagctacagcagctgatatggccgcggtttgtgatatcgttaaccattacattgagacgtctacagtgaactttaggacagagccacaaacaccacaagagtggattgatgatctagagaggttgcaagatagatacccttggttggttgctgaggttgagggtgttgtggctggtattgcttacgctgggccctggaaggctaggaacgcttacgattggacagttgagagtactgtttacgtgtcacataggcatcaaaggttgggcctaggatctacattgtacacacatttgcttaagtctatggaggcgcaaggttttaagtctgtggttgctgttataggccttccaaacgatccatctgttaggttgcatgaggctttgggatacacagcccggggtacattgcgcgcagctggatacaagcatggtggatggcatgatgttggtttttggcaaagggattttgagttgccagctcctccaaggccagttaggccagttacccaaatctgagtagttagcttaatcacctagagctcgatcggcggcaatagcttcttagcgccatcccgggttgatcctatctgtgttgaaatagttgcggtgggcaaggctctctttcagaaagacaggcggccaaaggaacccaaggtgaggtgggctatggctctcagttccttgtggaagcgcttggtctaaggtgcagaggtgttagcgggatgaagcaaaagtgtccgattgtaacaagatatgttgatcctacgtaaggatattaaagtatgtattcatcactaatataatcagtgtattccaatatgtactacgatttccaatgtctttattgtcgccgtatgtaatcggcgtcacaaaataatccccggtgactttcttttaatccaggatgaaataatatgttattataatttttgcgatttggtccgttataggaattgaagtgtgcttgaggtcggtcgccaccactcccatttcataattttacatgtatttgaaaaataaaaatttatggtattcaatttaaacacgtatacttgtaaagaatgatatcttgaaagaaatatagtttaaatatttattgataaaataacaagtcaggtattatagtccaagcaaaaacataaatttattgatgcaagtttaaattcagaaatatttcaataactgattatatcagctggtacattgccgtagatgaaagactgagtgcgatattatggtgtaatacataggaattcgtttaaacgatctgcgtctaattttcggtccaacttgcacaggaaagacgtcgaccgcggtagctcttgcccagcagactgggcttccagtcctttcgctcgatcgggtccaatgttgtcctcagctgtgaaccggaagcggacgaccaacagtggaagaactgaaaggaacgagccgtctataccttgatgatcggcctctggtgaagggtatcatcgcagccaagcaagctcatgaaaggctgatgggggaggtgtataattatgaggcccacggcgggcttattctttagggaggatctatctcgttgctcaagtgcatggcgcaaagcagttattggagtgcggattttcgttggcatattattcgccacgagttagcagacgaagagaccttcatgaacgtggccaaggccagagttaagcagatgttacgccctgctgcaggcctttctattatccaatagttggttgatctttggaaagagcctcggctgaggcccatactgaaagagatcgatggatatcgatatgccatgttgtttgctagccagaaccagatcacatccgatatgctattgcagcttgacgcagatatggaggataagttgattcatgggatcgctcaggagtagctcatccatgcacgccgacaagaacagaaattccgtcgagttaacgcagccgcttacgacggattcgaaggtcatccattcggaatgtattagtttgcaccagctccgcgtcacacctgtcttcatttgaataagatgttagcaattgtttttagctttgtcttgttgtggcagggcggcaagtgcttcagacatcattctgttttcaaattttatgctggagaacagcttcttaattcctttggaaataatagactgcgtcttaaaattcagatgtctggatatagatatgattgtaaaataacctatttaagtgtcatttagaacataagttttatgaatgttcttccattttcgtcatcgaacgaataagagtaaatacaccttttttaacattacaaataagttcttatacgttgtttatacaccgggaatcatttccattattttcgcgcaaaagtcacggatattcgtgaaagcgacataaactgcgaaatttgcggggagtgtcttgagtttgcctcgaggctagcgcatgcacatagacacacacatcatctcattgatgcttggtaataattgtcattagattgtttttatgcatagatgcactcgaaatcagccaattttagacaagtatcaaacggatgtgacttcagtacattaaaaacgtccgcaatgtgttattaagttgtctaagcgtcaatttgatttacaattgaatatatcctgccccagccagccaacagctcgatttacaattgaatatatcctgccggccggcccacgcgtgtcgaggaattctgatctggcccccatttggacgtgaatgtagacacgtcgaaataaagatttccgaattagaataatttgtttattgctttcgcctataaatacgacggatcgtaatttgtcgttttatcaaaatgtactttcattttataataacgctgcggacatctacatttttgaattgaaaaaaaattggtaattactctttctttttctccatattgaccatcatactcattgctgatccatgtagatttcccggacatgaagccatttacaattgaatatatcctgccgccgctgccgctttgcacccggtggagcttgcatgttggtttctacgcagaactgagccggttaggcagataatttccattgagaactgagccatgtgcaccttccccccaacacggtgagcgacggggcaacggagtgatccacatgggacttttaaacatcatccgtcggatggcgttgcgagagaagcagtcgatccgtgagatcagccgacgcaccgggcaggcgcgcaacacgatcgcaaagtatttgaacgcaggtacaatcgagccgacgttcacgcggaacgaccaagcaagcttggctgccatttttggggtgaggccgttcgcggccgaggggcgcagcccctggggggatgggaggcccgcgttagcgggccgggagggttcgagaagggggggcaccccccttcggcgtgcgcggtcacgcgcacagggcgcagccctggttaaaaacaaggtttataaatattggtttaaaagcaggttaaaagacaggttagcggtggccgaaaaacgggcggaaacccttgcaaatgctggattttctgcctgtggacagcccctcaaatgtcaataggtgcgcccctcatctgtcagcactctgcccctcaagtgtcaaggatcgcgcccctcatctgtcagtagtcgcgcccctcaagtgtcaataccgcagggcacttatccccaggcttgtccacatcatctgtgggaaactcgcgtaaaatcaggcgttttcgccgatttgcgaggctggccagctccacgtcgccggccgaaatcgagcctgcccctcatctgtcaacgccgcgccgggtgagtcggcccctcaagtgtcaacgtccgcccctcatctgtcagtgagggccaagttttccgcgaggtatccacaacgccggcggccgcggtgtctcgcacacggcttcgacggcgtttctggcgcgtttgcagggccatagacggccgccagcccagcggcgagggcaaccagcccggtgagcgtcggaaagggtcgacggatcttttccgctgcataaccctgcttcggggtcattatagcgattttttcggtatatccatcctttttcgcacgatatacaggattttgccaaagggttcgtgtagactttccttggtgtatccaacggcgtcagccgggcaggataggtgaagtaggcccacccgcgagcgggtgttccttcttcactgtcccttattcgcacctggcggtgctcaacgggaatcctgctctgcgaggctggccggctaccgccggcgtaacagatgagggcaagcggatggctgatgaaaccaagccaaccaggaagggcagcccacctatcaaggtgtactgccttccagacgaacgaagagcgattgaggaaaaggcggcggcggccggcatgagcctgtcggcctacctgctggccgtcggccagggctacaaaatcacgggcgtcgtggactatgagcacgtccgcgagctggcccgcatcaatggcgacctgggccgcctgggcggcctgctgaaactctggctcaccgacgacccgcgcacggcgcggttcggtgatgccacgatcctcgccctgctggcgaagatcgaagagaagcaggacgagcttggcaaggtcatgatgggcgtggtccgcccgagggcagagccatgacttttttagccgctaaaacggccggggggtgcgcgtgattgccaagcacgtccccatgcgctccatcaagaagagcgacttcgcggagctggtattcgtgcagggcaagattcggaataccaagtacgagaaggacggccagacggtctacgggaccgacttcattgccgataaggtggattatctggacaccaaggcaccaggcgggtcaaatcaggaataagggcacattgccccggcgtgagtcggggcaatcccgcaaggagggtgaatgaatcggacgtttgaccggaaggcatacaggcaagaactgatcgacgcggggttttccgccgaggatgccgaaaccatcgcaagccgcaccgtcatgcgtgcgccccgcgaaaccttccagtccgtcggctcgatggtccagcaagctacggccaagatcgagcgcgacagcgtgcaactggctccccctgccctgcccgcgccatcggccgccgtggagcgttcgcgtcgtctcgaacaggaggcggcaggtttggcgaagtcgatgaccatcgacacgcgaggaactatgacgaccaagaagcgaaaaaccgccggcgaggacctggcaaaacaggtcagcgaggccaagcaggccgcgttgctgaaacacacgaagcagcagatcaaggaaatgcagctttccttgttcgatattgcgccgtggccggacacgatgcgagcgatgccaaacgacacggcccgctctgccctgttcaccacgcgcaacaagaaaatcccgcgcgaggcgctgcaaaacaaggtcattttccacgtcaacaaggacgtgaagatcacctacaccggcgtcgagctgcgggccgacgatgacgaactggtgtggcagcaggtgttggagtacgcgaagcgcacccctatcggcgagccgatcaccttcacgttctacgagctttgccaggacctgggctggtcgatcaatggccggtattacacgaaggccgaggaatgcctgtcgcgcctacaggcgacggcgatgggcttcacgtccgaccgcgttgggcacctggaatcggtgtcgctgctgcaccgcttccgcgtcctggaccgtggcaagaaaacgtcccgttgccaggtcctgatcgacgaggaaatcgtcgtgctgtttgctggcgaccactacacgaaattcatatgggagaagtaccgcaagctgtcgccgacggcccgacggatgttcgactatttcagctcgcaccgggagccgtacccgctcaagctggaaaccttccgcctcatgtgcggatcggattccacccgcgtgaagaagtggcgcgagcaggtcggcgaagcctgcgaagagttgcgaggcagcggcctggtggaacacgcctgggtcaatgatgacctggtgcattgcaaacgctagggccttgtggggtcagttccggctgggggttcagcagccagcgctttactggcatttcaggaacaagcgggcactgctcgacgcacttgcttcgctcagtatcgctcgggacgcacggcgcgctctacgaactgccgataaacagaggattaaaattgacaattgtgattaaggctcagattcgacggcttggagcggccgacgtgcaggatttccgcgagatccgattgtcggccctgaagaaagctccagagatgttcgggtccgtttacgagcacgaggagaaaaagcccatggaggcgttcgctgaacggttgcgagatgccgtggcattcggcgcctacatcgacggcgagatcattgggctgtcggtcttcaaacaggaggacggccccaaggacgctcacaaggcgcatctgtccggcgttttcgtggagcccgaacagcgaggccgaggggtcgccggtatgctgctgcgggcgttgccggcgggtttattgctcgtgatgatcgtccgacagattccaacgggaatctggtggatgcgcatcttcatcctcggcgcacttaatatttcgctattctggagcttgttgtttatttcggtctaccgcctgccgggcggggtcgcggcgacggtaggcgctgtgcagccgctgatggtcgtgttcatctctgccgctctgctaggtagcccgatacgattgatggcggtcctgggggctatttgcggaactgcgggcgtggcgctgttggtgttgacaccaaacgcagcgctagatcctgtcggcgtcgcagcgggcctggcgggggcggtttccatggcgttcggaaccgtgctgacccgcaagtggcaacctcccgtgcctctgctcacctttaccgcctggcaactggcggccggaggacttctgctcgttccagtagctttagtgtttgatccgccaatcccgatgcctacaggaaccaatgttctcggcctggcgtggctcggcctgatcggagcgggtttaacctacttcctttggttccgggggatctcgcgactcgaacctacagttgtttccttactgggctttctcagcccccgagcgcttagtgggaatttgtaccccttatcgaaccgggagcacaggatgacgcctaacaattcattcaagccgacaccgcttcgcggcgcggcttaattcaggagttaaacatcatgagggaagcggtgatcgccgaagtatcgactcaactatcagaggtagttggcgtcatcgagcgccatctcgaaccgacgttgctggccgtacatttgtacggctccgcagtggatggcggcctgaagccacacagtgatattgatttgctggttacggtgaccgtaaggcttgatgaaacaacgcggcgagctttgatcaacgaccttttggaaacttcggcttcccctggagagagcgagattctccgcgctgtagaagtcaccattgttgtgcacgacgacatcattccgtggcgttatccagctaagcgcgaactgcaatttggagaatggcagcgcaatgacattcttgcaggtatcttcgagccagccacgatcgacattgatctggctatcttgctgacaaaagcaagagaacatagcgttgccttggtaggtccagcggcggaggaactctttgatccggttcctgaacaggatctatttgaggcgctaaatgaaaccttaacgctatggaactcgccgcccgactgggctggcgatgagcgaaatgtagtgcttacgttgtcccgcatttggtacagcgcagtaaccggcaaaatcgcgccgaaggatgtcgctgccgactgggcaatggagcgcctgccggcccagtatcagcccgtcatacttgaagctaggcaggcttatcttggacaagaagatcgcttggcctcgcgcgcagatcagttggaagaatttgttcactacgtgaaaggcgagatcaccaaggtagtcggcaaataatgtctaacaattcgttcaagccgacgccgcttcgcggcgcggcttaactcaagcgttagagagctggggaagactatgcgcgatctgttgaaggtggttctaagcctcgtcttgcgatggcatttcgatccattcccattccgcgctcaagatggcttcccctcggcagttcatcagggctaaatcaatctagccgacttgtccggtgaaatgggctgcactccaacagaaacaatcaaacaaacatacacagcgacttattcacacgagctcaaattacaacggtatatatcctgccagtcagcatcatcacaccaaaagttaggcccgaatagtttgaaattagaaagctcgcaattgaggtctacaggccaaattcgctcttagccgtacaatattactcaccggatcctaaccggtttaattaaggcgcgccatgcccgggcaagcggccgcacaagtttgtacaaaaaagcaggcttctag

SEQ ID NO: 52 - DNA, 36767 bp, Artificial sequence
  plasmid pDAB7734
gatccacaaccaaaaatggcagcgaggctgcaagagcagaaaggaggtgagatggacacgaggattgcgatcataggcatgagcgccatacttccttgtggaaccacggtgagagagtcatgggagaccataagggctggcattgattgcctgtctgatcttcctgaggatcgtgttgatgtgactgcgtactttgacccagtcaagaccacaaaggacaaaatctactgcaagagaggaggtttcattcctgagtatgactttgatgcgcgtgagtttggtctcaacatgttccagatggaagattctgatgcgaatcagaccatctcacttctcaaggtcaaagaagcacttcaagatgctgggattgatgcacttggaaaggagaagaaaaacataggatgcgtgcttggcattggaggtggacagaagagttcacatgagttctacagcagactcaactatgtggttgtggagaaagtcttgagaaagatggggatgccagaggaagatgtcaaagtggctgtggagaagtacaaagcgaacttcccagaatggagacttgactctttccctggattccttgggaatgtcactgctggcagatgcaccaacacattcaacttggatggcatgaactgcgttgtggatgctgcatgtgcaagctccttgatagcagtcaaggttgcgattgatgaactgctctatggtgactgcgacatgatggtcactggtgcaacctgcacagacaactccattgggatgtacatggctttctcaaagacacctgtgttcagcacggacccaagtgtgagagcgtatgatgagaaaacgaaagggatgctcattggtgagggatcagccatgttggtgctcaaacgttatgcagatgcagtgagggatggtgatgagattcatgctgtgattcgtggttgtgcaagctcaagtgatggcaaagcagctggcatctacactcccacaatcagtggtcaagaggaagccttgagacgtgcatacaatcgtgcctgcgttgaccctgccactgtcactttggttgagggtcatgggactggcactccagttggagataggattgagttgactgcgttgaggaacttgtttgacaaagcgtatggtgaagggaacacagagaaagttgcagttggaagtatcaagtccagtattggtcatttgaaggctgttgctggtcttgctggaatgatcaaggtcatcatggctctcaaacacaagactttgcctggaacgatcaatgtggacaatccacccaatctctatgacaacactcccatcaatgagtcatccctctacatcaacacgatgaacagaccctggttccctccacctggtgttccgagacgtgctggaatatccagctttggctttggaggtgccaactaccatgcagtgttggaagaggctgaaccagagcacacgacagcgtacagactcaacaaacgtccacaaccggtgttgatgatggctgcaactcctgctgcgttgcagagcctttgtgaagctcagctgaaagagtttgaagctgcgatcaaggagaatgagacagtcaagaatactgcctacatcaagtgtgtcaagtttggagaacagttcaagttccctgggagcatacctgcgaccaatgcgagactgggattcttggtcaaagatgcggaggatgcgtgctccacgcttcgtgctatatgtgctcagtttgccaaagatgtgaccaaagaagcgtggaggcttccgagagaaggagtttctttccgtgccaaaggcattgccaccaatggtgctgttgctgcactcttctctggacaaggtgctcagtacacacacatgttcagtgaagttgcgatgaactggcctcagttcagacagtccattgctgcaatggacgctgcacagtccaaggttgctggaagtgacaaagactttgaaagagtctctcaagtcctgtacccaaggaaaccgtacgaacgtgagccagaacaagatcacaagaaaatctcactcacagcatacagccagccgtcaaccctggcatgtgctcttggtgcctttgagattttcaaggaagctggattcactccagactttgcagctggacacagcttgggtgagtttgctgcgctctatgcagctggttgtgttgacagagatgagttgtttgaacttgtttgcagaagggcaaggatcatgggaggcaaagatgcacctgccacacccaaaggttgcatggcagctgtcataggacccaacgcagagaacatcaaggttcaagctgccaacgtctggcttggaaactcaaactctccgtctcagactgtcattactgggtctgttgaagggattcaagctgaaagtgccagattgcagaaggaagggttcagagttgtgcctcttgcttgtgagtctgccttccattctccacagatggaaaatgccagctcagctttcaaagatgtcatatccaaggtttccttccgtacacccaaagcagaaacaaagctcttcagcaatgtttctggagagacctatccgacggatgccagagagatgctcactcaacacatgacctcatctgtgaagttcctgacccaagtgaggaacatgcaccaagctggtgcgagaatctttgttgagtttggaccgaaacaagttctcagcaaacttgtttctgaaaccctcaaagatgacccgtctgttgtcacagtgtctgtgaacccagcttctggcacggactctgacatacagttgagggatgctgcagttcagctggttgtggctggtgtcaatcttcaagggtttgacaagtgggatgctcctgatgccacgaggatgcaagccatcaagaaaaagagaaccacactcagactttcagctgccacctatgtcagtgacaagaccaagaaagtgagggatgctgccatgaacgacggaagatgtgtcacatacctcaagggtgctgcaccactcatcaaggctcctgaacctgtggttgacgaagctgccaagagggaggctgaaaggcttcagaaggagcttcaagacgctcagaggcagcttgacgacgccaaacgtgcagctgcagaagccaactccaaacttgctgctgccaaggaggaagccaagactgctgcagcttcagccaagcctgcagttgacactgctgttgtggagaaacatcgtgccatcctcaagtccatgctggctgagctggatggttatggaagtgttgatgcttcttcccttcagcaacagcaacagcaacagactgctccggcgcctgttaaagccgctgcccctgccgctcccgttgcaagtgctcctgctcccgccgtgtccaacgagttgcttgagaaagctgagacagttgtgatggaggttctcgctgccaagactggatacgaaacagacatgattgaggcggacatggagcttgagactgagttgggaattgacagcatcaagagggttgaaattctttctgaagtccaagctatgcttaacgttgaggcgaaagatgttgatgctctctctaggacgagaacagtgggtgaagttgtcaacgctatgaaggcagaaatcgctggttcttccgctccggcgccggcagctgccgcacctgcaccggctaaagcggctccagctgcagctgcaccagctgtttctaatgagctgctcgaaaaggcagaaactgttgtgatggaagtccttgctgccaaaactggctacgaaactgacatgatagaatcagacatggagcttgagacggagcttggaattgattccatcaagcgtgtggaaatcctcagtgaagtccaagccatgctcaatgtggaagctaaggatgtggatgctctctcaaggaccagaactgtcggtgaggttgtcaatgccatgaaggctgagatagctggaggctccgctcctgcgccggccgctgccgctcctggtcccgctgccgcggctccagctccagctgcagccgctccggccgtctcaaacgaactccttgaaaaagctgagaccgtcgtgatggaggtcttggcagctaaaaccggctatgagactgacatgattgagtctgacatggaattggagacagaacttgggatagacagcatcaaacgtgttgaaatcctcagtgaggtccaagctatgctgaacgtggaagcgaaggatgttgatgctctgtccagaacgaggaccgttggtgaggttgtggatgccatgaaggctgaaattgctggagggtctgcgcccgcgccagctgcagccgctcctgcacccgcagccgcggcacctgctccagctgcacctgcacctgccgtttcttcagaactcttggagaaggctgagacggttgtgatggaggttttggctgcaaagactggctatgagaccgacatgattgaatctgatatggaattggagacagagcttgggatcgattccatcaaaagagtggagatcctgagtgaagtccaagccatgctcaatgttgaagctaaggatgttgatgcactttcaagaacaaggacagtgggtgaggttgtggatgccatgaaggcggagattgctggagggagcgcgcctgcgccagctgccgcggcacctgcaccggcagccgcagctccagctccagctgcaccagcaccggccgcgcccgcgccagctgtttcatccgaactcctggaaaaggccgagacggttgtgatggaggtgctcgcagctaagactggttacgagaccgacatgattgaaagtgacatggagcttgaaaccgagttgggaatagatagcatcaaacgtgttgaaatcttgtctgaggtccaagctatgttgaacgtggaggcaaaagatgtcgatgcgctttcaagaaccagaacagtcggtgaggtcgtggacgccatgaaggctgaaattgccggaagctctgctagtgcgccagctgcagccgcacctgcacctgctgccgcggcacctgctccagctgcagccgctcctgccgtcagcaatgagttgctggagaaagccgaaacagttgtgatggaagtccttgctgcaaaaactggttacgaaacggacatgattgagtcagacatggaattggagaccgaacttggaatagattccatcaagagagtggagatcctctctgaggtgcaagccatgctcaacgttgaggctaaagatgttgatgcactcagtaggacaagaactgtgggggaagttgtcgatgcgatgaaggctgagattgctggaggctctgctcctgcgccggcagctgccgcacctgcacccgcagccgcggcaccagctgtcagcaacgaattgcttgagaaggctgaaacagttgtcatggaagtgctggctgcaaaaaccggctatgagactgacatgattgagtctgacatggaacttgagacggaattgggcattgacagcatcaagcgtgttgagatcctcagtgaagtccaagcaatgctcaatgtggaggctaaggatgtggatgccctctcaaggaccagaacagttggtgaggtcgttgatgcgatgaaggcggagatcgctggaagttccgcgcctgcgccagctgcagccgctcctgcacccgcagccgcggcaccggctccagctgcagccgcaccggccgtctcctcagaactcctggaaaaggctgagacagttgtgatggaagtccttgctgcgaaaactggctatgagaccgacatgattgaatctgacatggaactggagaccgagcttggaattgactccatcaaacgtgttgaaatcctctctgaggttcaagcgatgttgaatgtggaggccaaagatgttgatgctctttccagaacaaggacggtgggagaggtggttgatgccatgaaggctgagatagctgggggttctgctcctgcgccagctgcagccgctcctgctcccgctgccgcggcaccagctgtcagcaacgaactccttgaaaaagctgaaactgttgtgatggaggttttggctgcaaagactggatacgagactgacatgatagagtcagacatggagttggaaacagagcttgggattgatagcatcaagcgtgtggaaatcctttctgaggttcaagccatgctgaacgttgaggccaaagatgtcgatgctttgtcaaggaccagaacggttggagaagtggtcgatgccatgaaggctgagatagctggtggatcagcccctgctccggctgcagccgctcctgcaagtgccggtgctgcaccagctgtgaagattgattcagttcatggtgctgactgtgacgatttgtcactgatgcacgcaaaggtggttgacatcagaaggccagatgaactgattctggaaagaccggagaaccgtccagttcttgtcgttgacgatggctcagagttgacacttgctcttgtgagggtgttgggagcctgtgcagttgtcttgacctttgagggattgcagttggctcagagagctggtgcagctgccattcgtcatgttctggctaaggacctttcagcagaatcagctgagaaggccatcaaagaggctgagcaaagatttggagcgttgggaggcttcataagccagcaagcagaaaggtttgaaccagctgagatactgggtttcacactcatgtgtgcgaagtttgccaaagcctctctctgcactgctgtggctggaggtcgtcctgccttcatcggtgtggctaggcttgacggcagacttggattcacctctcaaggcacttctgacgcactcaagagagcacagcgtggagcgatctttggactctgcaagacaatagggttggagtggtcagaatctgatgtgttcagccgtggtgtggacattgctcaagggatgcacccagaagatgctgcagttgccatagttagggagatggcgtgtgctgacatcagaatcagagaggttgggattggagcaaaccagcaaagatgcacaatcagagctgccaagttggagactgggaaccctcagagacagatagcgaaagacgatgtgcttctggtttctggaggtgctcgtgggatcacacctctttgcatccgtgagatcacgcgtcagattgctggaggcaagtacattctgttgggtcgtagcaaagtttctgcgtctgaaccagcatggtgtgctggcatcactgatgagaaggctgtgcagaaagctgccacccaagagttgaagagggccttcagtgctggtgaaggacccaaacccactccaagggctgtcacgaaacttgtgggatctgttcttggtgctcgtgaagtgagaagctccattgctgccattgaagctctgggtggcaaagcgatctacagctcttgtgatgtgaactctgctgcagatgttgccaaagcagttagggatgcagagtcccagcttggtgccagagttagtggaatcgttcacgcttctggtgtgctccgtgatcgtctcatagagaagaaactccctgacgagtttgatgctgtctttgggaccaaagtcactgggttggagaatcttctggctgcagttgatcgtgccaacctcaaacacatggttctcttcagctcccttgctggtttccacggcaatgttggtcagtctgactatgcgatggcaaacgaagctctcaacaagatgggtttggaacttgcgaaggatgtcagtgtcaagtccatctgctttggtccctgggatggtgggatggtgacacctcaactcaagaaacagtttcaagaaatgggagttcagatcattcctcgtgaaggaggtgctgatacagttgcgaggattgtgttgggatcaagtcctgctgagatccttgttggaaactggaggacaccatccaagaaagttggaagtgacacgatcaccctgcatagaaagatcagtgccaagtccaatcccttcttggaggatcatgtcatacaaggcagaagggtgttgccaatgacccttgctattgggagccttgctgagacctgccttggactcttccctggctactctctctgggccatagatgacgcacagctcttcaaaggtgtcactgttgatggagacgtcaactgtgaagtgaccctcacaccgtccactgctccgagtgggagggtgaatgtccaagcgacgctcaagacgttctcaagtggaaaacttgttccagcctacagagctgtcatagtgttgtccaaccaaggtgctccacctgccaatgcaaccatgcagcctccgagccttgatgcagatcctgctttgcaagggtcagtctatgatggcaagactctctttcatggtcctgcgttcagaggcattgatgacgttctcagctgcaccaagagccagcttgttgccaagtgttctgctgttcctggatcagatgcagccagaggagagtttgcaactgacactgatgcacatgatccctttgtcaatgatcttgcctttcaagcaatgttggtctgggtgaggagaacgctgggacaagctgcactcccgaactccattcagaggatagtccaacacagaccggtcccacaagacaaacccttctacatcaccctcagatccaatcagagtggtggacatagccagcacaaacatgcacttcagttccacaacgaacaaggtgatctcttcattgatgttcaagcctctgtcattgcgacagactcacttgcgttctgagtagttagcttaatcacttaggtcacccagtccaagcccggcctagcacgatgatcatgagtgttgctattgatgtatgttaatactatacacagtcatcgtgtgtgttttataaaactgtaagcttaggatgtttgaggctaatgtaattagcactacaccgtaataaatgagaggtttactttatgttttaataatgttcttacccttgctgctctctaaactgtaatggcgtacggttagctaaactaaagtaaaaatcgattcgcttgagtaaaattagtgaccgggaaagatcatcgactactactgctcagagatgtaatcggtaattaagacttcaagctcaataattaattaggagtaaatctggcttcgaatttttaaattgtcaacttccaaagaaggattggcaagactcaatctcaattgcccaacaaacatatggctctttacaaatttggaatctctttttgatggcaagaacgtcgtaattcctctgtcgatctcatgtaattaccaaactcatctacttattactttctttatatgcacttactgatgcggccgcttaattaagatgagtgatactcaggactcaggactcactctgctgatcactagtgctagcctcgaggtcgacacaactttgtatacaaaagttgtctaggatctgcttttacatgcgagacacatcttctaaagtaattttaataatagttactatattcaagatttcatatatcaaatactcaatattacttctaaaaaattaattagatataattaaaatattacttttttaattttaagtttaattgttgaatttgtgactattgatttattattctactatgtttaaattgttttatagatagtttaaagtaaatataagtaatgtagtagagtgttagagtgttaccctaaaccataaactataagatttatggtggactaattttcatatatttcttattgcttttaccttttcttggtatgtaagtccgtaactggaattactgtgggttgccatgacactctgtggtcttttggttcatgcatggatcttgcgcaagaaaaagacaaagaacaaagaaaaaagacaaaacagagagacaaaacgcaatcacacaaccaactcaaattagtcactggctgatcaagatcgccgcgtccatgtatgtctaaatgccatgcaaagcaacacgtgcttaacatgcactttaaatggctcacccatctcaacccacacacaaacacattgcctttttcttcatcatcaccacaaccacctgtatatattcattctcttccgccacctcaatttcttcacttcaacacacgtcaacctgcatatgcgtgtcatcccatgcccaaatctccatgcatgttccaaccaccttctctcttatataatacctataaatacctctaatatcactcacttctttcatcatccatccatccagagtactactactctactactataataccccaacccaactcatattcaatactactctaggatccacaaccaaaaatggctgcaaggaacgtgagtgcggctcatgagatgcatgacgagaagaggatagctgttgtgggcatggctgttcagtatgctggatgcaaaacgaaagacgagttctgggaagttctcatgaatggaaaagttgagagcaaagtgatcagcgacaaacgtcttggttcaaattaccgtgctgaacactacaaagctgaaaggagcaagtatgctgacaccttctgcaatgagacatatggaactcttgatgagaacgaaatagacaatgagcatgaactccttttgaaccttgccaaacaagccttggctgaaacatctgtcaaagattcaacaagatgtggcatagtttctggatgcctcagcttcccgatggacaacctccaaggtgaactcttgaatgtgtaccagaaccatgttgagaagaaacttggtgccagagttttcaaagatgcctctcactggtcagaaagagaacagtccaacaaaccagaggctggtgacagaagaatcttcatggaccctgcttcctttgttgctgaggaactcaatcttggcgctctccactactctgttgatgctgcctgtgccactgcgctctatgtgctcagactggcgcaagatcacttggtctctggtgcagctgatgtgatgctttgtggtgcaacatgcctgccggagccgtttttcatactctctgggttctcaaccttccaagccatgcctgttggaacgggtcagaatgtgtccatgccgctgcacaaagattctcaaggattgacccctggtgaaggaggttccatcatggtcctcaaacgtttggatgacgcaatcagagatggagatcacatctatggaacacttttgggagccaatgtcagcaacagtggcactggtctgccacttaaaccccttttgccgtcagagaaaaagtgcctcatggacacctacacacgtatcaatgtgcatccccacaagattcagtatgttgaatgccatgcaactgggactccacaaggtgatcgtgtggaaattgatgctgtgaaggcttgctttgaaggcaaagtcccacgttttggaaccacaaaagggaactttggacacacattggtggcagctgggtttgctggcatgtgcaaagtgcttctctccatgaagcacgggatcattccacccactccgggaatagatgacgaaacgaagatggaccctctggttgtctctggtgaggccattccctggccagaaacgaatggagaaccgaagcgtgctggtctctcagcgtttggatttggtgggaccaatgctcatgctgtctttgaggaacatgacccaagcaatgctgcatgcactggccatgactccatttctgctctctctgcacgttgtggtggtgagtcaaacatgagaatagcaatcactgggatggatgccacttttggtgctttgaaaggattggatgcttttgaaagggccatctacactggtgctcatggtgctataccactcccagaaaagagatggagattcctggggaaagacaaggacttccttgatctttgtggagtcaaagcaacaccgcatggctgttacattgaagatgttgaagttgatttccagaggctgaggactccaatgactcctgaagatatgctcttgcctcaacagcttctggctgtcaccacaattgatagggccatattggactctggcatgaagaaaggtggaaatgtggctgtctttgtggggttggggaccgatcttgaactctaccgtcaccgtgcaagggttgctctcaaggagagagtgaggcctgaagccagcaagaaactcaatgacatgatgcagtacatcaatgattgtgggacaagcacttcttacaccagctacataggcaacttggttgcaacaagggtcagttcacaatggggcttcacgggaccttccttcacaatcacagaaggcaacaattctgtgtacagatgtgctgaacttggcaaatacctcttggaaacgggagaggttgatggggttgtggttgcgggtgttgatctctgtgggagtgctgagaacctttacgtcaagtcaaggcgtttcaaggtgtctacatctgacaccccgagagccagctttgatgcagctgctgatggttactttgttggagagggctgtggtgcatttgtgctcaagcgtgagacaagctgcaccaaggatgacagaatctatgcttgcatggatgccatagttcctggaaatgttccatctgcatgtttgagagaggcattggatcaagccagagtcaagcctggagacatcgagatgttggagctttctgctgattcagcgaggcatttgaaggacccgtctgttctcccaaaggaactcactgctgaggaagagattggcggacttcagacgattcttcgtgacgatgacaagctcccaaggaatgttgcaactggaagtgtcaaggccactgttggtgacactggttatgcttctggtgctgccagtttgattaaggctgcgctttgcatctacaaccgttacctgcccagcaatggagatgactgggatgaacctgcacctgaagcaccctgggacagcacactctttgcgtgccagacctcaagagcttggttgaagaaccctggtgagagacgttatgcggctgtttccggagtcagtgaaaccagaagttgctacagtgtgctgctttctgaagcagagggacactacgagagagagaacagaatcagtttggatgaggaagcacccaagctcattgtgttgagagcagactcccatgaagagattcttggaagattggacaagataagggaaaggttcttgcagcccacgggtgctgcacccagagagtctgaattgaaggcgcaagcccgtaggatctttcttgaactccttggtgagacccttgcccaagatgcagcttcatctggaagtcagaagccccttgctctcagcttggtctccactccatccaagctccagagagaggtggaacttgcggcaaaaggcattccgagatgtctcaagatgagacgtgattggagttcccctgctggaagcagatatgcgcctgagcctttggccagtgacagagttgccttcatgtatggagaaggaaggagcccttactatggcatcacacaagacattcataggatttggcctgaacttcatgaggtcatcaatgagaaaacaaaccgtctctgggctgaaggtgacagatgggtcatgccaagggccagcttcaagagtgagcttgagtcacaacagcaagagtttgacagaaacatgattgaaatgttccgtcttggaatcctcacctcaattgccttcacaaacctggcgagagatgttctcaacatcacgcccaaagcagcctttggactcagtttgggagagatttccatgatctttgctttctccaagaaaaacggtttgataagcgatcagttgacaaaggatttgagagagtcagatgtctggaacaaagctctggctgttgagttcaatgcgctcagagaagcctggggcattccacagtctgtcccaaaagatgagttctggcaaggttacatagtgaggggaacgaaacaagacatagaagcagccatagcaccagactcaaagtatgtgaggttgaccatcatcaatgatgccaacactgctctcatcagtggaaagcctgatgcatgcaaagctgcgattgctcgtcttggtggcaacatccctgcgcttccagtcactcaaggcatgtgtgggcattgcccagaggtgggaccttacaccaaggacatcgcaaagatccacgccaaccttgagttccctgtggttgatggtcttgatctctggactaccataaaccagaagaggcttgtgccaagagccacgggtgccaaagatgaatgggctccttcatcctttggggagtatgctggacagctctatgagaaacaagccaacttccctcagatagttgaaaccatctacaagcagaactatgatgtgtttgttgaagttgggccaaacaatcacagaagcacagcagtgagaaccacgcttggaccacagagaaaccaccttgctggtgccatagacaagcagaacgaggatgcttggacgacaatagtcaagctcgtggcttcattgaaggctcaccttgttcctggagtgaccatcagtccgctctaccactccaagctcgttgcagaggctgaggcttgttatgctgcgctctgtaaaggtgagaaacccaagaaaaacaagtttgtgagaaagattcagttgaatggcagattcaacagcaaggcagaccccatctcctcagcagaccttgcatccttcccacctgcggaccctgcgattgaagctgccatctcttcaaggatcatgaagcctgtggctccgaaattctatgcgcgtctcaacattgatgagcaagatgagaccagagatccgatcttgaacaaggacaatgcgccttccagctccagctcttccagcagttcctcttccagcagttcatctccgtctcctgctccttcagctccagttcagaagaaagctgccccagctgcggagacaaaagctgttgccagtgctgatgcacttcgtagtgccctgcttgatcttgactccatgcttgcgctcagctctgcaagtgcttctggcaaccttgttgagactgcgccatctgatgccagtgtcattgtccctccgtgcaacattgctgatcttggcagcagagctttcatgaaaacttatggtgtttctgcgcctctgtacaccggtgcaatggccaagggaattgcctctgcggacttggtgatcgcagctggaaggcaaggaatccttgcgtcatttggtgctggaggccttccaatgcaagttgtgcgtgagtccattgaaaagattcaagctgccctgcccaatggaccatatgctgtcaacctcatccattctccttttgacagcaaccttgagaagggaaatgttgatctcttcttggaaaagggtgtcacttttgttgaggcttcagccttcatgacgttgacaccgcaagttgtcagatacagagcggctgggttgacgaggaatgcagatgggtcagtcaacataaggaacagaatcattgggaaagtctccagaactgagctggctgaaatgttcatgcgtcctgcacctgagcatcttttgcagaagctcattgcttctggggagatcaatcaagaacaagctgagttggccagacgtgttcctgtggctgatgacattgcggttgaagctgattctggtggacacactgacaaccgtccaatccatgtcattctgcctctgattatcaacctgagggataggcttcacagagagtgtggatacccagcaaacctgagggttcgtgttggtgctgggggtggcattgggtgtccccaagctgcgctggcaactttcaacatgggtgcctctttcattgtcactggaacagtgaaccaagttgccaaacaatctgggacgtgtgacaatgtgaggaaacagcttgcgaaagcaacttactcagatgtttgcatggcaccggcagctgacatgtttgaggaaggtgtgaaacttcaagttttgaagaaaggaacaatgttcccttcaagagccaacaaactctatgagttgttctgcaagtatgattcttttgagtccatgcctccagcagagcttgcgagggttgagaaaagaatcttcagtcgtgcattggaagaggtctgggatgagaccaagaacttctacatcaaccgtctccacaacccagagaagatacagagggctgagagggaccccaaactgaagatgtcactgtgtttcagatggtatctgtccctggcttcaaggtgggccaacactggagcttctgacagagtcatggactaccaagtttggtgtggtcctgccattggttcattcaatgatttcatcaaaggaacttaccttgatccggcagtggcaaatgagtacccgtgtgttgtgcagatcaacaaacagattcttagaggagcgtgcttcttgaggcgtcttgaaatactgagaaatgcaaggctttcagatggtgcagctgcacttgtggcgagcattgatgacacatatgtccctgctgagaagctgtgagtagttagcttaatcacttaggtcacctcgagtatcaaaatctatttagaaatacacaatattttgttgcaggcttgctggagaatcgatctgctatcataaaaattacaaaaaaattttatttgcctcaattattttaggattggtattaaggacgcttaaattatttgtcgggtcactacgcatcattgtgattgagaagatcagcgatacgaaatattcgtagtactatcgataatttatttgaaaattcataagaaaagcaaacgttacatgaattgatgaaacaatacaaagacagataaagccacgcacatttaggatattggccgagattactgaatattgagtaagatcacggaatttctgacaggagcatgtcttcaattcagcccaaatggcagttgaaatactcaaaccgccccatatgcaggagcggatcattcattgtttgtttggttgcctttgccaacatgggagtccaaggttggcgcgccgaattcgcggccgcttaattaatctgacctgaccactagacctgagtgagtacagatgtgctactagtgctagcctcgaggtcgaccaacttttctatacaaagttgtctagacctaggttaattaagcggccgcagcttatttctcttttcgatactctaattgagccgtgcgctctatctagaccaattagaattgatggagctctaaaggttgctggctgttttcttgttcatatgattaacttctaaacttgtgtataaatattctctgaaagtgcttcttttggcatatgtaggttgggcaaaaacgaggaagattgcttctcaatttggaagatgatgaacagccgaagaagaaaataagaataggcagtcctgctactcaatggatctcagtctataacggtcgtcgtcccatgaaacagaggtaacacattttttgcatatacactttgatagttcctcactaactgtgtaatcttttggtagatatcactacaatgttggagagacaaggctgcgccagcatatacagaagggaaatgaagatggccttttgattagctgtgtagcatcagcagctaatctctgggctctcatcatggatgctggaactggattcacttctcaagtttatgagttgtcaccggtcttcctacacaaggtaataatcagttgaagcaattaagaatcaatctgatttgtagtaaactaagaagaacttaccttatgatttccccgcaggactggattatggaacaatgggaaaagaactactatataagctccatagcgggttcagataacgggagctctttagttgttatgtcaaaaggttagtgtttagtgaataataaacttattatcaaaaagtcttcattgacttatttatatacttgttgtgaattggtaggaactacttattctcagcagtcatacaaagtgagtgactcatttccattcaagtggataaataagaaatggaaagaagattttcatgtaacctccatgacaactgctggtaatcgttggggtgtggtaatgtcgaggaactctggcttctctgatcaggtaggtttttgtctcttattgtctggtgtttttattttcccctgatagtctaatatgataaactctgcgttgtgaaaggtggtggagcttgactttttgtacccaagcgatgggatacataggaggtgggagaatgggtatagaataacatcaatggcagcaactgcggatcaagcagctttcatattaagcataccaaagcgtaagatggtggatgaaactcaagagactctccgcaccaccgcctttccaagtactcatgtcaaggttggtttctttagctttgaacacagatttggatctttttgttttgtttccatatacataggacctgagagcttttggttgaattttttttttttcaggacaaatgggcgaagaatctgtacattgcatcaatatgctatggcaggacagtgtgctgatgatacacacttaagcatcatgtgttgtgttagaaagccgaagacaattggagcgagcctcagggtcgtcataataccaatcaaagacgtaaaaccagacgcagtctctttggttgaatgtgatgaaagggatgtgtcttggtatgtatgtacgagtaacaaaagagaagatgcaattgagtagtagaaagatttgagagctttttaaagcccttcaagtgtgtgcttttatcttattgatatcatccatttgcgttgtttaatgcgtctttagatatgtttctgtttctttctcagtgtctgaatatctgataagtgcaatgtgagaaagccacaccaaaccaaaatattcaaatcttatatttttaataatgtcgaatcactcggagttgccaccttctgtgccaattgtgctgaatctatcacactaaaaaaaacatttcttcaaggtaatgacttgtggactatgttctgaattctcattaagtttttattttttgaagtttaagtttttaccttcttttttgaaaaatatcgttcataagatgtcacgccaggacatgagctacacatcacatattagcatgcagatgcggacgatttgtcactcacttcaaacacctaaaagagcttctctctcacagcacacacacatatgcatgcaatatttacacgtgatcgccatgcaaatctccattctcacctataaattagaggctcggcttcactttttactcaaaccaaaactcatcactacaagatccacaaccaaaaatggcgcttcgtgtcaagaccaacaagaagccatgttgggagatgaccaaggaggaactgacctctggcaaaactgaggtgttcaactatgaggaactcctggagtttgcagagggtgacatagctaaggtttttggtccggagtttgctgtcatagacaagtaccccagaagggtgaggctgcctgctcgtgaatacctgcttgtgacaagggtcacactcatggatgccgaggtcaacaactacagagttggtgccagaatggtcactgagtatgatcttccagtgaatggcgaattgtctgagggaggtgattgtccctgggcagttctggttgagagtggacagtgcgatttgatgctgatatcatacatgggaattgatttccagaaccaaggtgacagagtttaccgtctgctcaacaccacgttgacattctatggggttgcccatgagggagagacccttgagtatgacatcagagtgaccggttttgccaaacgtttggatggtggcatctccatgttcttctttgagtatgactgctatgtcaatgggaggcttctcattgagatgagagatggctgtgctggcttcttcacaaatgaggagcttgatgcgggaaagggtgtggtgttcacaagaggggatttggctgccagagctaagattccaaagcaagatgtttctccctatgctgtcgctccctgccttcacaaaacaaaactcaacgaaaaggagatgcagaccttggttgacaaagattgggcttccgtttttggctcaaagaatggcatgccggagatcaactacaaactctgcgcacgtaagatgctcatgattgatagagtcaccagcattgaccataagggaggtgtgtacggtttgggtcagttggttggtgagaaaatcttggagagggaccattggtacttcccatgccattttgttaaggatcaagtcatggctggatctcttgtcagcgacggttgttcacaaatgctcaagatgtacatgatctggctcggtttgcaccttaccaccggaccatttgacttcagacccgtcaacggacacccgaacaaagttaggtgtaggggtcagatatctcctcataagggaaagttggtctacgtcatggagatcaaagagatgggattcgacgaggataacgatccgtacgccattgctgacgtcaacatcattgacgttgatttcgaaaagggtcaagatttcagccttgatagaatcagcgactacggaaagggggatcttaacaaaaagatcgtcgtggacttcaagggcattgctctcaagatgcagaagagatccacgaacaagaacccctccaaagttcagcccgtttttgctaacggtgcagccactgtgggaccggaagcgtccaaggccagctctggtgccagtgctagtgcttctgctgcccctgcgaagcctgctttctcagcagatgttcttgcgccaaagccagttgcacttcctgaacatatcctcaagggtgacgctctcgctccgaaagaaatgtcctggcatcccatgtcaaaacttcctggcaacccgacgccgttcttctcccctagttcttaccctccgagggcaatttgcttcatccctttccctggcaacccacttgacaacaattgcaaagctggagaaatgcctctgaactggtacaacatgtcagagttcatgtgtggaaaagttagcaactgcttgggaccagagttcgcaagatttgataagtcaaatacgagcagaagccctgcttttgatttggctcttgtgactagagttgttgaagtcacaaacatggaacatggcaagttcctgaatgttgattgcaatcccagcaaaggcacaatggtgggggagtttgactgtcctcaagatgcgtggttctttgatggttcttgcaatgatgggcacatgccttattccatcatcatggaaatcggacttcagacatccggtgttctcaccagtgtgttgaaagcaccactgacgatggacaaagatgacattctctttaggaaccttgatgcaagtgctgaaatggtgaggccagatgtggatgtgagggggaaaaccataaggaatgtgaccaagtgcactggatatgcaatgttgggaaagatggggattcacagattcacgtttgagttgtctgttgatggcgtggttttctacaaaggaagcacttcctttggatggttcactccagaggtgtttgctcagcaagctggacttgacaatgggaaaaagacggagccttggtgcaaaactaacaacacgagtgtgagaagagttgaaatcgcatcagccaaaggcaaagaacagctgactgagaaacttccagatgcaactaatgctcaagttctcagaaggtcagaacagtgtgagtatttggattacctcaacattgctcctgattctgggctgcatgggaaaggatatgcgcatggacacaaagatgttaacccacaagactggttcttctcttgtcacttttggtttgatcctgtgatgcctggatctttgggaattgagtcaatgttccagctcattgaggcatttgcggtggaccagaacataccgggagaatacaatgtgagcaatccgacctttgcccatgcccctggaaaaacggcgtggaagtaccgtggtcaattgacaccaaagaaccgtgcgatggactgtgaggtgcacatagtttcaatcacagcctctcctgaaaatggaggctacgttgacatagtggcagatggagcactttgggttgatggtctccgtgtgtatgaagccaaagaactcagagttcgtgttgtcagtgcaaaacctcaagccattccggatgttcaacaacagccacccagcgcaaaagcggaccctgggaaaactggagttgcactcagtccgactcagttgagagatgtcctgcttgaagtggacaatccattgtatcttggtgttgaaaactccaatttggtgcagtttgaatccaaacctgcaacttcttcaaggattgtcagtatcaaaccatgctccataagtgatcttggtgacaagtccttcatggaaacgtacaatgtgtcagcacctctgtacactggagcaatggccaagggaattgcgtctgcggaccttgtcattgctgctgggaagaggaagatattgggttcttttggagcgggtgggcttccaatgcaccatgtgagggcagctttggagaagatacaagcggctctgcctcaaggaccatatgctgtgaacctcattcattcaccttttgacagcaacttggaaaaggggaatgttgatctcttcctcgaaaagggcgttactgtggtggaggcttctgcattcatgaccctcactccccaagttgttcgttaccgtgcagccggactctcaaggaacgctgatgggagtgtcaacatcagaaaccgtatcattggaaaagtgtccagaacagaactcgccgaaatgttcatcagaccggctccggaacacctccttgagaaactcatagcttctggtgagataacacaagaacaagccgaacttgcccgtcgtgttcctgtcgcagacgacatcgctgttgaagctgattctggtggtcacactgacaaccgtcccatccacgtcatcttgcctttgatcatcaaccttaggaacagactgcacagagagtgtggttatcctgcgcaccttagagtcagagttggagctggaggcggtgttggctgcccacaagctgctgcggctgccctcacaatgggagctgccttcatagtgactgggactgtcaatcaagttgctaaacagtccgggacatgtgacaacgtgagaaaacaactcagtcaagccacctacagtgacatttgcatggctccagcagctgatatgtttgaggaaggtgtgaaactccaagttctcaagaagggaacaatgttcccatcaagagctaacaaattgtacgaactcttttgcaagtacgactctttcgattcaatgcctcctgctgaacttgaaaggatcgagaagaggatcttcaagagggcacttcaagaggtctgggaagagaccaaggacttttacatcaatggtttgaagaatccagagaagatacagagagcggaacatgaccccaaactcaagatgtctttgtgtttcagatggtatcttggtcttgcatcacgttgggccaacatgggtgctcctgatcgtgtcatggactatcaagtctggtgtggtccagccattggagccttcaatgacttcatcaaaggaacatatcttgatcctgctgtctctaatgagtacccatgtgttgtccagatcaaccttcagattttgcgtggtgcatgttacctgaggcgtcttaatgctctgagaaatgatccgaggattgatcttgagactgaagatgctgcctttgtctatgagccaacgaatgcgctttgagtagttagcttaatcacttaggtcaccattccaaacgaaatatcctcgagagtgtgtataccacggtgatatgagtgtggttgttgatgtatgttaacactacatagtcatggtgtgtgttccataaataatgtactaatgtaataagaactactccgtagacggtaataaaagagaagtttttttttttactcttgctactttcctataaagtgatgattaacaacagatacaccaaaaagaaaacaattaatctatattcacaatgaagcagtactagtctattgaacatgtcagattttctttttctagatgtctaatcaagccttcaaggctagtgataaaagatcatccaatgggatccaacaaagactcaaatctggttttgatcagatacttcgaaactatttttgtatgcactaaattatgcaagtgttcttttatttggtgaagactctttagaagcaaagaacgataagcagtaataaaaaaaataaagttcagttttaagatttgttattgacttagcggccgcttaattaaactagtgctagcctcgaggtcgacacaactttgtataataaagttgtctagacctaggagctgtgctgggtaactcacatgagtcactggtcacatcagcggccgcagcttatagtaaagatttttttgttaataaaatgaaagttaatatttatggatttatttgaacatatttacaagtttttgttaataaatttatttacagaagtgttaaatttgaaaatgtgttaaatgagagttaatatttatggatataatattactttatttaaaaataaaatgaatttatattaaaatatgatttggtaaaagatattataaagaggaacttggatgagaaagacgacgatgggcaaaagttgcatggcacaccgcttttgttcagtaacatctgcactgtggcgcctttttcacactcaccatgcatgctgccacgtcagctttcacactatgacaccactggccatacacgttgccacctcagctttctcctcttctcactatgacacgactggccatgcatgcatgcatgctgccacctcagctcccgcctcttcacccgtgtctttctctcatgtcgcagtgctgcgtgccaacctcttctctctataaatagagagaagagaatgatggttaaactcaaaccaaaacaagaaaacatacacaaatagcaaaacggatccacaaccaaaaatgcttcagcacacttggcttccgaagcctcccaatctgaccctcttgtcagatgaggttcatctctggaggattcctcttgaccagcctgagtcacaacttcaagaccttgctgccaccctgagcagtgatgaattggcgagggcaaacagattctactttccagaacacagaaggcgtttcactgctgggagaggcatcctcagatccatcttgggtggatacttgggagtggaaccgggtcaagtcaagtttgattatgagtcccgtgggaaaccgatccttggtgacagatttgctgagagtggactcctgttcaacttgtctcacagccagaaccttgccttgtgtgctgtcaactacacgcgtcaaataggcattgatcttgaatatctgcgtccaacatctgacttggagtctcttgcaaagaggttctttctcccaagagaatatgaactcttgaggtcactccctgatgagcagaaacagaagattttctttcgttactggacttgcaaagaggcttatctcaaagcaacgggagatggaatagccaaacttgaagagatcgagatagcactcaccccaacagaacctgccaagctccaaacagctcctgcgtggtctctgttggagcttgtgccagatgacaattgtgttgcagctgtggctgttgcgggttttggttggcagcccaagttctggcattactgagtagttagcttaatcacttaggtcacccagtccaagcccggcctagcacgatgatcatgagtgttgctattgatgtatgttaatactatacacagtcatcgtgtgtgttttataaaactgtaagcttaggatgtttgaggctaatgtaattagcactacaccgtaataaatgagaggtttactttatgttttaataatgttcttacccttgctgctctctaaactgtaatggcgtacggttagctaaactaaagtaaaaatcgattcgcttgagtaaaattagtgaccgggaaagatcatcgactactactgctcagagatgtaatcggtaattaagacttcaagctcaataattaattaggagtaaatctggcttcgaatttttaaattgtcaacttccaaagaaggattggcaagactcaatctcaattgcccaacaaacatatggctctttacaaatttggaatctctttttgatggcaagaacgtcgtaattcctctgtcgatctcatgtaattaccaaactcatctacttattactttctttatatgcacttactgatgcggccgcttaattaactactgtcactgaggccgtagacgagtacggactgatctaactagtgctagcctcgaggtcgacacccagctttcttgtacaaagtggttgcggccgcttaattaaatttaaattcaattaatgcaatcttgattttcaacaacgaaggtaatggcgtaaaagaaaaaatgtatgttattgtattgatctttcatgatgttgaagcgtgccataatatgatgatgtataattaaaatattaactgtcgcattttattgaaatggcactgttatttcaaccatatctttgattctgttacatgacacgactgcaagaagtaaataatagacgccgttgttaaagaattgctatcatatgtgcctaactagagggaatttgagcgtcagacctaatcaaatattacaaaatatctcactctgtcgccagcaatggtgtaatcagcgcagacaaatggcgtaaagatcgcggaaaaacctccccgagtggcatgatagctgcctctgtattgctgatttagtcagccttatttgacttaagggtgccctcgttagtgacaaattgctttcaaggagacagccatgccccacactttgttgaaaaacaaattgcctttggggagacggtaaagccagttgctcttcaataaggaatgtcgaggaggcaatgtaaccgcctctggtagtacacttctctaatccaaaaatcaatttgtattcaagataccgcaaaaaacttatggtttaaaccctgcaggactagtccagaaggtaattatccaagatgtagcatcaagaatccaatgtttacgggaaaaactatggaagtattatgtaagctcagcaagaagcagatcaatatgcggcacatatgcaacctatgttcaaaaatgaagaatgtacagatacaagatcctatactgccagaatacgaagaagaatacgtagaaattgaaaaagaagaaccaggcgaagaaaagaatcttgaagacgtaagcactgacgacaacaatgaaaagaagaagataaggtcggtgattgtgaaagagacatagaggacacatgtaaggtggaaaatgtaagggcggaaagtaaccttatcacaaaggaatcttatcccccactacttatccttttatatttttccgtgtcatttttgcccttgagttttcctatataaggaaccaagttcggcatttgtgaaaacaagaaaaaatttggtgtaagctattttctttgaagtactgaggatacaacttcagagaaatttgtaagtttgtaggtaccagatctggatcccaaaccatgtctccggagaggagaccagttgagattaggccagctacagcagctgatatggccgcggtttgtgatatcgttaaccattacattgagacgtctacagtgaactttaggacagagccacaaacaccacaagagtggattgatgatctagagaggttgcaagatagatacccttggttggttgctgaggttgagggtgttgtggctggtattgcttacgctgggccctggaaggctaggaacgcttacgattggacagttgagagtactgtttacgtgtcacataggcatcaaaggttgggcctaggatctacattgtacacacatttgcttaagtctatggaggcgcaaggttttaagtctgtggttgctgttataggccttccaaacgatccatctgttaggttgcatgaggctttgggatacacagcccggggtacattgcgcgcagctggatacaagcatggtggatggcatgatgttggtttttggcaaagggattttgagttgccagctcctccaaggccagttaggccagttacccaaatctgagtagttagcttaatcacctagagctcgatcggcggcaatagcttcttagcgccatcccgggttgatcctatctgtgttgaaatagttgcggtgggcaaggctctctttcagaaagacaggcggccaaaggaacccaaggtgaggtgggctatggctctcagttccttgtggaagcgcttggtctaaggtgcagaggtgttagcgggatgaagcaaaagtgtccgattgtaacaagatatgttgatcctacgtaaggatattaaagtatgtattcatcactaatataatcagtgtattccaatatgtactacgatttccaatgtctttattgtcgccgtatgtaatcggcgtcacaaaataatccccggtgactttcttttaatccaggatgaaataatatgttattataatttttgcgatttggtccgttataggaattgaagtgtgcttgaggtcggtcgccaccactcccatttcataattttacatgtatttgaaaaataaaaatttatggtattcaatttaaacacgtatacttgtaaagaatgatatcttgaaagaaatatagtttaaatatttattgataaaataacaagtcaggtattatagtccaagcaaaaacataaatttattgatgcaagtttaaattcagaaatatttcaataactgattatatcagctggtacattgccgtagatgaaagactgagtgcgatattatggtgtaatacataggaattcgtttaaacgatctgcgtctaattttcggtccaacttgcacaggaaagacgtcgaccgcggtagctcttgcccagcagactgggcttccagtcctttcgctcgatcgggtccaatgttgtcctcagctgtgaaccggaagcggacgaccaacagtggaagaactgaaaggaacgagccgtctataccttgatgatcggcctctggtgaagggtatcatcgcagccaagcaagctcatgaaaggctgatgggggaggtgtataattatgaggcccacggcgggcttattctttagggaggatctatctcgttgctcaagtgcatggcgcaaagcagttattggagtgcggattttcgttggcatattattcgccacgagttagcagacgaagagaccttcatgaacgtggccaaggccagagttaagcagatgttacgccctgctgcaggcctttctattatccaatagttggttgatctttggaaagagcctcggctgaggcccatactgaaagagatcgatggatatcgatatgccatgttgtttgctagccagaaccagatcacatccgatatgctattgcagcttgacgcagatatggaggataagttgattcatgggatcgctcaggagtagctcatccatgcacgccgacaagaacagaaattccgtcgagttaacgcagccgcttacgacggattcgaaggtcatccattcggaatgtattagtttgcaccagctccgcgtcacacctgtcttcatttgaataagatgttagcaattgtttttagctttgtcttgttgtggcagggcggcaagtgcttcagacatcattctgttttcaaattttatgctggagaacagcttcttaattcctttggaaataatagactgcgtcttaaaattcagatgtctggatatagatatgattgtaaaataacctatttaagtgtcatttagaacataagttttatgaatgttcttccattttcgtcatcgaacgaataagagtaaatacaccttttttaacattacaaataagttcttatacgttgtttatacaccgggaatcatttccattattttcgcgcaaaagtcacggatattcgtgaaagcgacataaactgcgaaatttgcggggagtgtcttgagtttgcctcgaggctagcgcatgcacatagacacacacatcatctcattgatgcttggtaataattgtcattagattgtttttatgcatagatgcactcgaaatcagccaattttagacaagtatcaaacggatgtgacttcagtacattaaaaacgtccgcaatgtgttattaagttgtctaagcgtcaatttgatttacaattgaatatatcctgccccagccagccaacagctcgatttacaattgaatatatcctgccggccggcccacgcgtgtcgaggaattctgatctggcccccatttggacgtgaatgtagacacgtcgaaataaagatttccgaattagaataatttgtttattgctttcgcctataaatacgacggatcgtaatttgtcgttttatcaaaatgtactttcattttataataacgctgcggacatctacatttttgaattgaaaaaaaattggtaattactctttctttttctccatattgaccatcatactcattgctgatccatgtagatttcccggacatgaagccatttacaattgaatatatcctgccgccgctgccgctttgcacccggtggagcttgcatgttggtttctacgcagaactgagccggttaggcagataatttccattgagaactgagccatgtgcaccttccccccaacacggtgagcgacggggcaacggagtgatccacatgggacttttaaacatcatccgtcggatggcgttgcgagagaagcagtcgatccgtgagatcagccgacgcaccgggcaggcgcgcaacacgatcgcaaagtatttgaacgcaggtacaatcgagccgacgttcacgcggaacgaccaagcaagcttggctgccatttttggggtgaggccgttcgcggccgaggggcgcagcccctggggggatgggaggcccgcgttagcgggccgggagggttcgagaagggggggcaccccccttcggcgtgcgcggtcacgcgcacagggcgcagccctggttaaaaacaaggtttataaatattggtttaaaagcaggttaaaagacaggttagcggtggccgaaaaacgggcggaaacccttgcaaatgctggattttctgcctgtggacagcccctcaaatgtcaataggtgcgcccctcatctgtcagcactctgcccctcaagtgtcaaggatcgcgcccctcatctgtcagtagtcgcgcccctcaagtgtcaataccgcagggcacttatccccaggcttgtccacatcatctgtgggaaactcgcgtaaaatcaggcgttttcgccgatttgcgaggctggccagctccacgtcgccggccgaaatcgagcctgcccctcatctgtcaacgccgcgccgggtgagtcggcccctcaagtgtcaacgtccgcccctcatctgtcagtgagggccaagttttccgcgaggtatccacaacgccggcggccgcggtgtctcgcacacggcttcgacggcgtttctggcgcgtttgcagggccatagacggccgccagcccagcggcgagggcaaccagcccggtgagcgtcggaaagggtcgacggatcttttccgctgcataaccctgcttcggggtcattatagcgattttttcggtatatccatcctttttcgcacgatatacaggattttgccaaagggttcgtgtagactttccttggtgtatccaacggcgtcagccgggcaggataggtgaagtaggcccacccgcgagcgggtgttccttcttcactgtcccttattcgcacctggcggtgctcaacgggaatcctgctctgcgaggctggccggctaccgccggcgtaacagatgagggcaagcggatggctgatgaaaccaagccaaccaggaagggcagcccacctatcaaggtgtactgccttccagacgaacgaagagcgattgaggaaaaggcggcggcggccggcatgagcctgtcggcctacctgctggccgtcggccagggctacaaaatcacgggcgtcgtggactatgagcacgtccgcgagctggcccgcatcaatggcgacctgggccgcctgggcggcctgctgaaactctggctcaccgacgacccgcgcacggcgcggttcggtgatgccacgatcctcgccctgctggcgaagatcgaagagaagcaggacgagcttggcaaggtcatgatgggcgtggtccgcccgagggcagagccatgacttttttagccgctaaaacggccggggggtgcgcgtgattgccaagcacgtccccatgcgctccatcaagaagagcgacttcgcggagctggtattcgtgcagggcaagattcggaataccaagtacgagaaggacggccagacggtctacgggaccgacttcattgccgataaggtggattatctggacaccaaggcaccaggcgggtcaaatcaggaataagggcacattgccccggcgtgagtcggggcaatcccgcaaggagggtgaatgaatcggacgtttgaccggaaggcatacaggcaagaactgatcgacgcggggttttccgccgaggatgccgaaaccatcgcaagccgcaccgtcatgcgtgcgccccgcgaaaccttccagtccgtcggctcgatggtccagcaagctacggccaagatcgagcgcgacagcgtgcaactggctccccctgccctgcccgcgccatcggccgccgtggagcgttcgcgtcgtctcgaacaggaggcggcaggtttggcgaagtcgatgaccatcgacacgcgaggaactatgacgaccaagaagcgaaaaaccgccggcgaggacctggcaaaacaggtcagcgaggccaagcaggccgcgttgctgaaacacacgaagcagcagatcaaggaaatgcagctttccttgttcgatattgcgccgtggccggacacgatgcgagcgatgccaaacgacacggcccgctctgccctgttcaccacgcgcaacaagaaaatcccgcgcgaggcgctgcaaaacaaggtcattttccacgtcaacaaggacgtgaagatcacctacaccggcgtcgagctgcgggccgacgatgacgaactggtgtggcagcaggtgttggagtacgcgaagcgcacccctatcggcgagccgatcaccttcacgttctacgagctttgccaggacctgggctggtcgatcaatggccggtattacacgaaggccgaggaatgcctgtcgcgcctacaggcgacggcgatgggcttcacgtccgaccgcgttgggcacctggaatcggtgtcgctgctgcaccgcttccgcgtcctggaccgtggcaagaaaacgtcccgttgccaggtcctgatcgacgaggaaatcgtcgtgctgtttgctggcgaccactacacgaaattcatatgggagaagtaccgcaagctgtcgccgacggcccgacggatgttcgactatttcagctcgcaccgggagccgtacccgctcaagctggaaaccttccgcctcatgtgcggatcggattccacccgcgtgaagaagtggcgcgagcaggtcggcgaagcctgcgaagagttgcgaggcagcggcctggtggaacacgcctgggtcaatgatgacctggtgcattgcaaacgctagggccttgtggggtcagttccggctgggggttcagcagccagcgctttactggcatttcaggaacaagcgggcactgctcgacgcacttgcttcgctcagtatcgctcgggacgcacggcgcgctctacgaactgccgataaacagaggattaaaattgacaattgtgattaaggctcagattcgacggcttggagcggccgacgtgcaggatttccgcgagatccgattgtcggccctgaagaaagctccagagatgttcgggtccgtttacgagcacgaggagaaaaagcccatggaggcgttcgctgaacggttgcgagatgccgtggcattcggcgcctacatcgacggcgagatcattgggctgtcggtcttcaaacaggaggacggccccaaggacgctcacaaggcgcatctgtccggcgttttcgtggagcccgaacagcgaggccgaggggtcgccggtatgctgctgcgggcgttgccggcgggtttattgctcgtgatgatcgtccgacagattccaacgggaatctggtggatgcgcatcttcatcctcggcgcacttaatatttcgctattctggagcttgttgtttatttcggtctaccgcctgccgggcggggtcgcggcgacggtaggcgctgtgcagccgctgatggtcgtgttcatctctgccgctctgctaggtagcccgatacgattgatggcggtcctgggggctatttgcggaactgcgggcgtggcgctgttggtgttgacaccaaacgcagcgctagatcctgtcggcgtcgcagcgggcctggcgggggcggtttccatggcgttcggaaccgtgctgacccgcaagtggcaacctcccgtgcctctgctcacctttaccgcctggcaactggcggccggaggacttctgctcgttccagtagctttagtgtttgatccgccaatcccgatgcctacaggaaccaatgttctcggcctggcgtggctcggcctgatcggagcgggtttaacctacttcctttggttccgggggatctcgcgactcgaacctacagttgtttccttactgggctttctcagcccccgagcgcttagtgggaatttgtaccccttatcgaaccgggagcacaggatgacgcctaacaattcattcaagccgacaccgcttcgcggcgcggcttaattcaggagttaaacatcatgagggaagcggtgatcgccgaagtatcgactcaactatcagaggtagttggcgtcatcgagcgccatctcgaaccgacgttgctggccgtacatttgtacggctccgcagtggatggcggcctgaagccacacagtgatattgatttgctggttacggtgaccgtaaggcttgatgaaacaacgcggcgagctttgatcaacgaccttttggaaacttcggcttcccctggagagagcgagattctccgcgctgtagaagtcaccattgttgtgcacgacgacatcattccgtggcgttatccagctaagcgcgaactgcaatttggagaatggcagcgcaatgacattcttgcaggtatcttcgagccagccacgatcgacattgatctggctatcttgctgacaaaagcaagagaacatagcgttgccttggtaggtccagcggcggaggaactctttgatccggttcctgaacaggatctatttgaggcgctaaatgaaaccttaacgctatggaactcgccgcccgactgggctggcgatgagcgaaatgtagtgcttacgttgtcccgcatttggtacagcgcagtaaccggcaaaatcgcgccgaaggatgtcgctgccgactgggcaatggagcgcctgccggcccagtatcagcccgtcatacttgaagctaggcaggcttatcttggacaagaagatcgcttggcctcgcgcgcagatcagttggaagaatttgttcactacgtgaaaggcgagatcaccaaggtagtcggcaaataatgtctaacaattcgttcaagccgacgccgcttcgcggcgcggcttaactcaagcgttagagagctggggaagactatgcgcgatctgttgaaggtggttctaagcctcgtcttgcgatggcatttcgatccattcccattccgcgctcaagatggcttcccctcggcagttcatcagggctaaatcaatctagccgacttgtccggtgaaatgggctgcactccaacagaaacaatcaaacaaacatacacagcgacttattcacacgagctcaaattacaacggtatatatcctgccagtcagcatcatcacaccaaaagttaggcccgaatagtttgaaattagaaagctcgcaattgaggtctacaggccaaattcgctcttagccgtacaatattactcaccggatcctaaccggtttaattaaggcgcgccatgcccgggcaagcggccgcacaagtttgtacaaaaaagcaggcttctagacctaggtggagtcatcacgcagactatctcagcatgtgcgtagcacgcggccgcagcttatagtaaagatttttttgttaataaaatgaaagttaatatttatggatttatttgaacatatttacaagtttttgttaataaatttatttacagaagtgttaaatttgaaaatgtgttaaatgagagttaatatttatggatataatattactttatttaaaaataaaatgaatttatattaaaatatgatttggtaaaagatattataaagaggaacttggatgagaaagacgacgatgggcaaaagttgcatggcacaccgcttttgttcagtaacatctgcactgtggcgcctttttcacactcaccatgcatgctgccacgtcagctttcacactatgacaccactggccatacacgttgccacctcagctttctcctcttctcactatgacacgactggccatgcatgcatgcatgctgccacctcagctcccgcctcttcacccgtgtctttctctcatgtcgcagtgctgcgtgccaacctcttctctctataaatagagagaagagaatgatggttaaactcaaaccaaaacaagaaaacatacacaaatagcaaaacg

SEQ ID NO: 53 - DNA, 35494 bp, Artificial sequence
  plasmid pDAB101493
aattacaacggtatatatcctgccagtcagcatcatcacaccaaaagttaggcccgaatagtttgaaattagaaagctcgcaattgaggtctacaggccaaattcgctcttagccgtacaatattactcaccggatcctaaccggtttaattaaggcgcgccatgcccgggcaagcggccgcacaagtttgtacaaaaaagcaggcttctagacctaggtggagtcatcacgcagactatctcagcatgtgcgtagcacgcggccgcagcttatagtaaagatttttttgttaataaaatgaaagttaatatttatggatttatttgaacatatttacaagtttttgttaataaatttatttacagaagtgttaaatttgaaaatgtgttaaatgagagttaatatttatggatataatattactttatttaaaaataaaatgaatttatattaaaatatgatttggtaaaagatattataaagaggaacttggatgagaaagacgacgatgggcaaaagttgcatggcacaccgcttttgttcagtaacatctgcactgtggcgcctttttcacactcaccatgcatgctgccacgtcagctttcacactatgacaccactggccatacacgttgccacctcagctttctcctcttctcactatgacacgactggccatgcatgcatgcatgctgccacctcagctcccgcctcttcacccgtgtctttctctcatgtcgcagtgctgcgtgccaacctcttctctctataaatagagagaagagaatgatggttaaactcaaaccaaaacaagaaaacatacacaaatagcaaaacggatccacaaccaaaaatggcagcgaggctgcaagagcagaaaggaggtgagatggacacgaggattgcgatcataggcatgagcgccatacttccttgtggaaccacggtgagagagtcatgggagaccataagggctggcattgattgcctgtctgatcttcctgaggatcgtgttgatgtgactgcgtactttgacccagtcaagaccacaaaggacaaaatctactgcaagagaggaggtttcattcctgagtatgactttgatgcgcgtgagtttggtctcaacatgttccagatggaagattctgatgcgaatcagaccatctcacttctcaaggtcaaagaagcacttcaagatgctgggattgatgcacttggaaaggagaagaaaaacataggatgcgtgcttggcattggaggtggacagaagagttcacatgagttctacagcagactcaactatgtggttgtggagaaagtcttgagaaagatggggatgccagaggaagatgtcaaagtggctgtggagaagtacaaagcgaacttcccagaatggagacttgactctttccctggattccttgggaatgtcactgctggcagatgcaccaacacattcaacttggatggcatgaactgcgttgtggatgctgcatgtgcaagctccttgatagcagtcaaggttgcgattgatgaactgctctatggtgactgcgacatgatggtcactggtgcaacctgcacagacaactccattgggatgtacatggctttctcaaagacacctgtgttcagcacggacccaagtgtgagagcgtatgatgagaaaacgaaagggatgctcattggtgagggatcagccatgttggtgctcaaacgttatgcagatgcagtgagggatggtgatgagattcatgctgtgattcgtggttgtgcaagctcaagtgatggcaaagcagctggcatctacactcccacaatcagtggtcaagaggaagccttgagacgtgcatacaatcgtgcctgcgttgaccctgccactgtcactttggttgagggtcatgggactggcactccagttggagataggattgagttgactgcgttgaggaacttgtttgacaaagcgtatggtgaagggaacacagagaaagttgcagttggaagtatcaagtccagtattggtcatttgaaggctgttgctggtcttgctggaatgatcaaggtcatcatggctctcaaacacaagactttgcctggaacgatcaatgtggacaatccacccaatctctatgacaacactcccatcaatgagtcatccctctacatcaacacgatgaacagaccctggttccctccacctggtgttccgagacgtgctggaatatccagctttggctttggaggtgccaactaccatgcagtgttggaagaggctgaaccagagcacacgacagcgtacagactcaacaaacgtccacaaccggtgttgatgatggctgcaactcctgctgcgttgcagagcctttgtgaagctcagctgaaagagtttgaagctgcgatcaaggagaatgagacagtcaagaatactgcctacatcaagtgtgtcaagtttggagaacagttcaagttccctgggagcatacctgcgaccaatgcgagactgggattcttggtcaaagatgcggaggatgcgtgctccacgcttcgtgctatatgtgctcagtttgccaaagatgtgaccaaagaagcgtggaggcttccgagagaaggagtttctttccgtgccaaaggcattgccaccaatggtgctgttgctgcactcttctctggacaaggtgctcagtacacacacatgttcagtgaagttgcgatgaactggcctcagttcagacagtccattgctgcaatggacgctgcacagtccaaggttgctggaagtgacaaagactttgaaagagtctctcaagtcctgtacccaaggaaaccgtacgaacgtgagccagaacaagatcacaagaaaatctcactcacagcatacagccagccgtcaaccctggcatgtgctcttggtgcctttgagattttcaaggaagctggattcactccagactttgcagctggacacagcttgggtgagtttgctgcgctctatgcagctggttgtgttgacagagatgagttgtttgaacttgtttgcagaagggcaaggatcatgggaggcaaagatgcacctgccacacccaaaggttgcatggcagctgtcataggacccaacgcagagaacatcaaggttcaagctgccaacgtctggcttggaaactcaaactctccgtctcagactgtcattactgggtctgttgaagggattcaagctgaaagtgccagattgcagaaggaagggttcagagttgtgcctcttgcttgtgagtctgccttccattctccacagatggaaaatgccagctcagctttcaaagatgtcatatccaaggtttccttccgtacacccaaagcagaaacaaagctcttcagcaatgtttctggagagacctatccgacggatgccagagagatgctcactcaacacatgacctcatctgtgaagttcctgacccaagtgaggaacatgcaccaagctggtgcgagaatctttgttgagtttggaccgaaacaagttctcagcaaacttgtttctgaaaccctcaaagatgacccgtctgttgtcacagtgtctgtgaacccagcttctggcacggactctgacatacagttgagggatgctgcagttcagctggttgtggctggtgtcaatcttcaagggtttgacaagtgggatgctcctgatgccacgaggatgcaagccatcaagaaaaagagaaccacactcagactttcagctgccacctatgtcagtgacaagaccaagaaagtgagggatgctgccatgaacgacggaagatgtgtcacatacctcaagggtgctgcaccactcatcaaggctcctgaacctgtggttgacgaagctgccaagagggaggctgaaaggcttcagaaggagcttcaagacgctcagaggcagcttgacgacgccaaacgtgcagctgcagaagccaactccaaacttgctgctgccaaggaggaagccaagactgctgcagcttcagccaagcctgcagttgacactgctgttgtggagaaacatcgtgccatcctcaagtccatgctggctgagctggatggttatggaagtgttgatgcttcttcccttcagcaacagcaacagcaacagactgctccggcgcctgttaaagccgctgcccctgccgctcccgttgcaagtgctcctgctcccgccgtgtccaacgagttgcttgagaaagctgagacagttgtgatggaggttctcgctgccaagactggatacgaaacagacatgattgaggcggacatggagcttgagactgagttgggaattgacagcatcaagagggttgaaattctttctgaagtccaagctatgcttaacgttgaggcgaaagatgttgatgctctctctaggacgagaacagtgggtgaagttgtcaacgctatgaaggcagaaatcgctggttcttccgctccggcgccggcagctgccgcacctgcaccggctaaagcggctccagctgcagctgcaccagctgtttctaatgagctgctcgaaaaggcagaaactgttgtgatggaagtccttgctgccaaaactggctacgaaactgacatgatagaatcagacatggagcttgagacggagcttggaattgattccatcaagcgtgtggaaatcctcagtgaagtccaagccatgctcaatgtggaagctaaggatgtggatgctctctcaaggaccagaactgtcggtgaggttgtcaatgccatgaaggctgagatagctggaggctccgctcctgcgccggccgctgccgctcctggtcccgctgccgcggctccagctccagctgcagccgctccggccgtctcaaacgaactccttgaaaaagctgagaccgtcgtgatggaggtcttggcagctaaaaccggctatgagactgacatgattgagtctgacatggaattggagacagaacttgggatagacagcatcaaacgtgttgaaatcctcagtgaggtccaagctatgctgaacgtggaagcgaaggatgttgatgctctgtccagaacgaggaccgttggtgaggttgtggatgccatgaaggctgaaattgctggagggtctgcgcccgcgccagctgcagccgctcctgcacccgcagccgcggcacctgctccagctgcacctgcacctgccgtttcttcagaactcttggagaaggctgagacggttgtgatggaggttttggctgcaaagactggctatgagaccgacatgattgaatctgatatggaattggagacagagcttgggatcgattccatcaaaagagtggagatcctgagtgaagtccaagccatgctcaatgttgaagctaaggatgttgatgcactttcaagaacaaggacagtgggtgaggttgtggatgccatgaaggcggagattgctggagggagcgcgcctgcgccagctgccgcggcacctgcaccggcagccgcagctccagctccagctgcaccagcaccggccgcgcccgcgccagctgtttcatccgaactcctggaaaaggccgagacggttgtgatggaggtgctcgcagctaagactggttacgagaccgacatgattgaaagtgacatggagcttgaaaccgagttgggaatagatagcatcaaacgtgttgaaatcttgtctgaggtccaagctatgttgaacgtggaggcaaaagatgtcgatgcgctttcaagaaccagaacagtcggtgaggtcgtggacgccatgaaggctgaaattgccggaagctctgctagtgcgccagctgcagccgcacctgcacctgctgccgcggcacctgctccagctgcagccgctcctgccgtcagcaatgagttgctggagaaagccgaaacagttgtgatggaagtccttgctgcaaaaactggttacgaaacggacatgattgagtcagacatggaattggagaccgaacttggaatagattccatcaagagagtggagatcctctctgaggtgcaagccatgctcaacgttgaggctaaagatgttgatgcactcagtaggacaagaactgtgggggaagttgtcgatgcgatgaaggctgagattgctggaggctctgctcctgcgccggcagctgccgcacctgcacccgcagccgcggcaccagctgtcagcaacgaattgcttgagaaggctgaaacagttgtcatggaagtgctggctgcaaaaaccggctatgagactgacatgattgagtctgacatggaacttgagacggaattgggcattgacagcatcaagcgtgttgagatcctcagtgaagtccaagcaatgctcaatgtggaggctaaggatgtggatgccctctcaaggaccagaacagttggtgaggtcgttgatgcgatgaaggcggagatcgctggaagttccgcgcctgcgccagctgcagccgctcctgcacccgcagccgcggcaccggctccagctgcagccgcaccggccgtctcctcagaactcctggaaaaggctgagacagttgtgatggaagtccttgctgcgaaaactggctatgagaccgacatgattgaatctgacatggaactggagaccgagcttggaattgactccatcaaacgtgttgaaatcctctctgaggttcaagcgatgttgaatgtggaggccaaagatgttgatgctctttccagaacaaggacggtgggagaggtggttgatgccatgaaggctgagatagctgggggttctgctcctgcgccagctgcagccgctcctgctcccgctgccgcggcaccagctgtcagcaacgaactccttgaaaaagctgaaactgttgtgatggaggttttggctgcaaagactggatacgagactgacatgatagagtcagacatggagttggaaacagagcttgggattgatagcatcaagcgtgtggaaatcctttctgaggttcaagccatgctgaacgttgaggccaaagatgtcgatgctttgtcaaggaccagaacggttggagaagtggtcgatgccatgaaggctgagatagctggtggatcagcccctgctccggctgcagccgctcctgcaagtgccggtgctgcaccagctgtgaagattgattcagttcatggtgctgactgtgacgatttgtcactgatgcacgcaaaggtggttgacatcagaaggccagatgaactgattctggaaagaccggagaaccgtccagttcttgtcgttgacgatggctcagagttgacacttgctcttgtgagggtgttgggagcctgtgcagttgtcttgacctttgagggattgcagttggctcagagagctggtgcagctgccattcgtcatgttctggctaaggacctttcagcagaatcagctgagaaggccatcaaagaggctgagcaaagatttggagcgttgggaggcttcataagccagcaagcagaaaggtttgaaccagctgagatactgggtttcacactcatgtgtgcgaagtttgccaaagcctctctctgcactgctgtggctggaggtcgtcctgccttcatcggtgtggctaggcttgacggcagacttggattcacctctcaaggcacttctgacgcactcaagagagcacagcgtggagcgatctttggactctgcaagacaatagggttggagtggtcagaatctgatgtgttcagccgtggtgtggacattgctcaagggatgcacccagaagatgctgcagttgccatagttagggagatggcgtgtgctgacatcagaatcagagaggttgggattggagcaaaccagcaaagatgcacaatcagagctgccaagttggagactgggaaccctcagagacagatagcgaaagacgatgtgcttctggtttctggaggtgctcgtgggatcacacctctttgcatccgtgagatcacgcgtcagattgctggaggcaagtacattctgttgggtcgtagcaaagtttctgcgtctgaaccagcatggtgtgctggcatcactgatgagaaggctgtgcagaaagctgccacccaagagttgaagagggccttcagtgctggtgaaggacccaaacccactccaagggctgtcacgaaacttgtgggatctgttcttggtgctcgtgaagtgagaagctccattgctgccattgaagctctgggtggcaaagcgatctacagctcttgtgatgtgaactctgctgcagatgttgccaaagcagttagggatgcagagtcccagcttggtgccagagttagtggaatcgttcacgcttctggtgtgctccgtgatcgtctcatagagaagaaactccctgacgagtttgatgctgtctttgggaccaaagtcactgggttggagaatcttctggctgcagttgatcgtgccaacctcaaacacatggttctcttcagctcccttgctggtttccacggcaatgttggtcagtctgactatgcgatggcaaacgaagctctcaacaagatgggtttggaacttgcgaaggatgtcagtgtcaagtccatctgctttggtccctgggatggtgggatggtgacacctcaactcaagaaacagtttcaagaaatgggagttcagatcattcctcgtgaaggaggtgctgatacagttgcgaggattgtgttgggatcaagtcctgctgagatccttgttggaaactggaggacaccatccaagaaagttggaagtgacacgatcaccctgcatagaaagatcagtgccaagtccaatcccttcttggaggatcatgtcatacaaggcagaagggtgttgccaatgacccttgctattgggagccttgctgagacctgccttggactcttccctggctactctctctgggccatagatgacgcacagctcttcaaaggtgtcactgttgatggagacgtcaactgtgaagtgaccctcacaccgtccactgctccgagtgggagggtgaatgtccaagcgacgctcaagacgttctcaagtggaaaacttgttccagcctacagagctgtcatagtgttgtccaaccaaggtgctccacctgccaatgcaaccatgcagcctccgagccttgatgcagatcctgctttgcaagggtcagtctatgatggcaagactctctttcatggtcctgcgttcagaggcattgatgacgttctcagctgcaccaagagccagcttgttgccaagtgttctgctgttcctggatcagatgcagccagaggagagtttgcaactgacactgatgcacatgatccctttgtcaatgatcttgcctttcaagcaatgttggtctgggtgaggagaacgctgggacaagctgcactcccgaactccattcagaggatagtccaacacagaccggtcccacaagacaaacccttctacatcaccctcagatccaatcagagtggtggacatagccagcacaaacatgcacttcagttccacaacgaacaaggtgatctcttcattgatgttcaagcctctgtcattgcgacagactcacttgcgttctgagtagttagcttaatcacttaggtcacccagtccaagcccggcctagcacgatgatcatgagtgttgctattgatgtatgttaatactatacacagtcatcgtgtgtgttttataaaactgtaagcttaggatgtttgaggctaatgtaattagcactacaccgtaataaatgagaggtttactttatgttttaataatgttcttacccttgctgctctctaaactgtaatggcgtacggttagctaaactaaagtaaaaatcgattcgcttgagtaaaattagtgaccgggaaagatcatcgactactactgctcagagatgtaatcggtaattaagacttcaagctcaataattaattaggagtaaatctggcttcgaatttttaaattgtcaacttccaaagaaggattggcaagactcaatctcaattgcccaacaaacatatggctctttacaaatttggaatctctttttgatggcaagaacgtcgtaattcctctgtcgatctcatgtaattaccaaactcatctacttattactttctttatatgcacttactgatgcggccgcttaattaagatgagtgatactcaggactcaggactcactctgctgatcactagtgctagcctcgaggtcgacacaactttgtatacaaaagttgtctaggatctgcttttacatgcgagacacatcttctaaagtaattttaataatagttactatattcaagatttcatatatcaaatactcaatattacttctaaaaaattaattagatataattaaaatattacttttttaattttaagtttaattgttgaatttgtgactattgatttattattctactatgtttaaattgttttatagatagtttaaagtaaatataagtaatgtagtagagtgttagagtgttaccctaaaccataaactataagatttatggtggactaattttcatatatttcttattgcttttaccttttcttggtatgtaagtccgtaactggaattactgtgggttgccatgacactctgtggtcttttggttcatgcatggatcttgcgcaagaaaaagacaaagaacaaagaaaaaagacaaaacagagagacaaaacgcaatcacacaaccaactcaaattagtcactggctgatcaagatcgccgcgtccatgtatgtctaaatgccatgcaaagcaacacgtgcttaacatgcactttaaatggctcacccatctcaacccacacacaaacacattgcctttttcttcatcatcaccacaaccacctgtatatattcattctcttccgccacctcaatttcttcacttcaacacacgtcaacctgcatatgcgtgtcatcccatgcccaaatctccatgcatgttccaaccaccttctctcttatataatacctataaatacctctaatatcactcacttctttcatcatccatccatccagagtactactactctactactataataccccaacccaactcatattcaatactactctaggatccacaaccaaaaatggctgcaaggaacgtgagtgcggctcatgagatgcatgacgagaagaggatagctgttgtgggcatggctgttcagtatgctggatgcaaaacgaaagacgagttctgggaagttctcatgaatggaaaagttgagagcaaagtgatcagcgacaaacgtcttggttcaaattaccgtgctgaacactacaaagctgaaaggagcaagtatgctgacaccttctgcaatgagacatatggaactcttgatgagaacgaaatagacaatgagcatgaactccttttgaaccttgccaaacaagccttggctgaaacatctgtcaaagattcaacaagatgtggcatagtttctggatgcctcagcttcccgatggacaacctccaaggtgaactcttgaatgtgtaccagaaccatgttgagaagaaacttggtgccagagttttcaaagatgcctctcactggtcagaaagagaacagtccaacaaaccagaggctggtgacagaagaatcttcatggaccctgcttcctttgttgctgaggaactcaatcttggcgctctccactactctgttgatgctgcctgtgccactgcgctctatgtgctcagactggcgcaagatcacttggtctctggtgcagctgatgtgatgctttgtggtgcaacatgcctgccggagccgtttttcatactctctgggttctcaaccttccaagccatgcctgttggaacgggtcagaatgtgtccatgccgctgcacaaagattctcaaggattgacccctggtgaaggaggttccatcatggtcctcaaacgtttggatgacgcaatcagagatggagatcacatctatggaacacttttgggagccaatgtcagcaacagtggcactggtctgccacttaaaccccttttgccgtcagagaaaaagtgcctcatggacacctacacacgtatcaatgtgcatccccacaagattcagtatgttgaatgccatgcaactgggactccacaaggtgatcgtgtggaaattgatgctgtgaaggcttgctttgaaggcaaagtcccacgttttggaaccacaaaagggaactttggacacacattggtggcagctgggtttgctggcatgtgcaaagtgcttctctccatgaagcacgggatcattccacccactccgggaatagatgacgaaacgaagatggaccctctggttgtctctggtgaggccattccctggccagaaacgaatggagaaccgaagcgtgctggtctctcagcgtttggatttggtgggaccaatgctcatgctgtctttgaggaacatgacccaagcaatgctgcatgcactggccatgactccatttctgctctctctgcacgttgtggtggtgagtcaaacatgagaatagcaatcactgggatggatgccacttttggtgctttgaaaggattggatgcttttgaaagggccatctacactggtgctcatggtgctataccactcccagaaaagagatggagattcctggggaaagacaaggacttccttgatctttgtggagtcaaagcaacaccgcatggctgttacattgaagatgttgaagttgatttccagaggctgaggactccaatgactcctgaagatatgctcttgcctcaacagcttctggctgtcaccacaattgatagggccatattggactctggcatgaagaaaggtggaaatgtggctgtctttgtggggttggggaccgatcttgaactctaccgtcaccgtgcaagggttgctctcaaggagagagtgaggcctgaagccagcaagaaactcaatgacatgatgcagtacatcaatgattgtgggacaagcacttcttacaccagctacataggcaacttggttgcaacaagggtcagttcacaatggggcttcacgggaccttccttcacaatcacagaaggcaacaattctgtgtacagatgtgctgaacttggcaaatacctcttggaaacgggagaggttgatggggttgtggttgcgggtgttgatctctgtgggagtgctgagaacctttacgtcaagtcaaggcgtttcaaggtgtctacatctgacaccccgagagccagctttgatgcagctgctgatggttactttgttggagagggctgtggtgcatttgtgctcaagcgtgagacaagctgcaccaaggatgacagaatctatgcttgcatggatgccatagttcctggaaatgttccatctgcatgtttgagagaggcattggatcaagccagagtcaagcctggagacatcgagatgttggagctttctgctgattcagcgaggcatttgaaggacccgtctgttctcccaaaggaactcactgctgaggaagagattggcggacttcagacgattcttcgtgacgatgacaagctcccaaggaatgttgcaactggaagtgtcaaggccactgttggtgacactggttatgcttctggtgctgccagtttgattaaggctgcgctttgcatctacaaccgttacctgcccagcaatggagatgactgggatgaacctgcacctgaagcaccctgggacagcacactctttgcgtgccagacctcaagagcttggttgaagaaccctggtgagagacgttatgcggctgtttccggagtcagtgaaaccagaagttgctacagtgtgctgctttctgaagcagagggacactacgagagagagaacagaatcagtttggatgaggaagcacccaagctcattgtgttgagagcagactcccatgaagagattcttggaagattggacaagataagggaaaggttcttgcagcccacgggtgctgcacccagagagtctgaattgaaggcgcaagcccgtaggatctttcttgaactccttggtgagacccttgcccaagatgcagcttcatctggaagtcagaagccccttgctctcagcttggtctccactccatccaagctccagagagaggtggaacttgcggcaaaaggcattccgagatgtctcaagatgagacgtgattggagttcccctgctggaagcagatatgcgcctgagcctttggccagtgacagagttgccttcatgtatggagaaggaaggagcccttactatggcatcacacaagacattcataggatttggcctgaacttcatgaggtcatcaatgagaaaacaaaccgtctctgggctgaaggtgacagatgggtcatgccaagggccagcttcaagagtgagcttgagtcacaacagcaagagtttgacagaaacatgattgaaatgttccgtcttggaatcctcacctcaattgccttcacaaacctggcgagagatgttctcaacatcacgcccaaagcagcctttggactcagtttgggagagatttccatgatctttgctttctccaagaaaaacggtttgataagcgatcagttgacaaaggatttgagagagtcagatgtctggaacaaagctctggctgttgagttcaatgcgctcagagaagcctggggcattccacagtctgtcccaaaagatgagttctggcaaggttacatagtgaggggaacgaaacaagacatagaagcagccatagcaccagactcaaagtatgtgaggttgaccatcatcaatgatgccaacactgctctcatcagtggaaagcctgatgcatgcaaagctgcgattgctcgtcttggtggcaacatccctgcgcttccagtcactcaaggcatgtgtgggcattgcccagaggtgggaccttacaccaaggacatcgcaaagatccacgccaaccttgagttccctgtggttgatggtcttgatctctggactaccataaaccagaagaggcttgtgccaagagccacgggtgccaaagatgaatgggctccttcatcctttggggagtatgctggacagctctatgagaaacaagccaacttccctcagatagttgaaaccatctacaagcagaactatgatgtgtttgttgaagttgggccaaacaatcacagaagcacagcagtgagaaccacgcttggaccacagagaaaccaccttgctggtgccatagacaagcagaacgaggatgcttggacgacaatagtcaagctcgtggcttcattgaaggctcaccttgttcctggagtgaccatcagtccgctctaccactccaagctcgttgcagaggctgaggcttgttatgctgcgctctgtaaaggtgagaaacccaagaaaaacaagtttgtgagaaagattcagttgaatggcagattcaacagcaaggcagaccccatctcctcagcagaccttgcatccttcccacctgcggaccctgcgattgaagctgccatctcttcaaggatcatgaagcctgtggctccgaaattctatgcgcgtctcaacattgatgagcaagatgagaccagagatccgatcttgaacaaggacaatgcgccttccagctccagctcttccagcagttcctcttccagcagttcatctccgtctcctgctccttcagctccagttcagaagaaagctgccccagctgcggagacaaaagctgttgccagtgctgatgcacttcgtagtgccctgcttgatcttgactccatgcttgcgctcagctctgcaagtgcttctggcaaccttgttgagactgcgccatctgatgccagtgtcattgtccctccgtgcaacattgctgatcttggcagcagagctttcatgaaaacttatggtgtttctgcgcctctgtacaccggtgcaatggccaagggaattgcctctgcggacttggtgatcgcagctggaaggcaaggaatccttgcgtcatttggtgctggaggccttccaatgcaagttgtgcgtgagtccattgaaaagattcaagctgccctgcccaatggaccatatgctgtcaacctcatccattctccttttgacagcaaccttgagaagggaaatgttgatctcttcttggaaaagggtgtcacttttgttgaggcttcagccttcatgacgttgacaccgcaagttgtcagatacagagcggctgggttgacgaggaatgcagatgggtcagtcaacataaggaacagaatcattgggaaagtctccagaactgagctggctgaaatgttcatgcgtcctgcacctgagcatcttttgcagaagctcattgcttctggggagatcaatcaagaacaagctgagttggccagacgtgttcctgtggctgatgacattgcggttgaagctgattctggtggacacactgacaaccgtccaatccatgtcattctgcctctgattatcaacctgagggataggcttcacagagagtgtggatacccagcaaacctgagggttcgtgttggtgctgggggtggcattgggtgtccccaagctgcgctggcaactttcaacatgggtgcctctttcattgtcactggaacagtgaaccaagttgccaaacaatctgggacgtgtgacaatgtgaggaaacagcttgcgaaagcaacttactcagatgtttgcatggcaccggcagctgacatgtttgaggaaggtgtgaaacttcaagttttgaagaaaggaacaatgttcccttcaagagccaacaaactctatgagttgttctgcaagtatgattcttttgagtccatgcctccagcagagcttgcgagggttgagaaaagaatcttcagtcgtgcattggaagaggtctgggatgagaccaagaacttctacatcaaccgtctccacaacccagagaagatacagagggctgagagggaccccaaactgaagatgtcactgtgtttcagatggtatctgtccctggcttcaaggtgggccaacactggagcttctgacagagtcatggactaccaagtttggtgtggtcctgccattggttcattcaatgatttcatcaaaggaacttaccttgatccggcagtggcaaatgagtacccgtgtgttgtgcagatcaacaaacagattcttagaggagcgtgcttcttgaggcgtcttgaaatactgagaaatgcaaggctttcagatggtgcagctgcacttgtggcgagcattgatgacacatatgtccctgctgagaagctgtgagtagttagcttaatcacttaggtcacctcgagtatcaaaatctatttagaaatacacaatattttgttgcaggcttgctggagaatcgatctgctatcataaaaattacaaaaaaattttatttgcctcaattattttaggattggtattaaggacgcttaaattatttgtcgggtcactacgcatcattgtgattgagaagatcagcgatacgaaatattcgtagtactatcgataatttatttgaaaattcataagaaaagcaaacgttacatgaattgatgaaacaatacaaagacagataaagccacgcacatttaggatattggccgagattactgaatattgagtaagatcacggaatttctgacaggagcatgtcttcaattcagcccaaatggcagttgaaatactcaaaccgccccatatgcaggagcggatcattcattgtttgtttggttgcctttgccaacatgggagtccaaggttggcgcgccgaattcgcggccgcttaattaatctgacctgaccactagacctgagtgagtacagatgtgctactagtgctagcctcgaggtcgaccaacttttctatacaaagttgtctagacctaggactaggcactgagtgactcactgacctgactgagtgactggcggccgcagcttatagtaaagatttttttgttaataaaatgaaagttaatatttatggatttatttgaacatatttacaagtttttgttaataaatttatttacagaagtgttaaatttgaaaatgtgttaaatgagagttaatatttatggatataatattactttatttaaaaataaaatgaatttatattaaaatatgatttggtaaaagatattataaagaggaacttggatgagaaagacgacgatgggcaaaagttgcatggcacaccgcttttgttcagtaacatctgcactgtggcgcctttttcacactcaccatgcatgctgccacgtcagctttcacactatgacaccactggccatacacgttgccacctcagctttctcctcttctcactatgacacgactggccatgcatgcatgcatgctgccacctcagctcccgcctcttcacccgtgtctttctctcatgtcgcagtgctgcgtgccaacctcttctctctataaatagagagaagagaatgatggttaaactcaaaccaaaacaagaaaacatacacaaatagcaaaacggatccacaaccaaaaatggcgcttcgtgtcaagaccaacaagaagccatgttgggagatgaccaaggaggaactgacctctggcaaaactgaggtgttcaactatgaggaactcctggagtttgcagagggtgacatagctaaggtttttggtccggagtttgctgtcatagacaagtaccccagaagggtgaggctgcctgctcgtgaatacctgcttgtgacaagggtcacactcatggatgccgaggtcaacaactacagagttggtgccagaatggtcactgagtatgatcttccagtgaatggcgaattgtctgagggaggtgattgtccctgggcagttctggttgagagtggacagtgcgatttgatgctgatatcatacatgggaattgatttccagaaccaaggtgacagagtttaccgtctgctcaacaccacgttgacattctatggggttgcccatgagggagagacccttgagtatgacatcagagtgaccggttttgccaaacgtttggatggtggcatctccatgttcttctttgagtatgactgctatgtcaatgggaggcttctcattgagatgagagatggctgtgctggcttcttcacaaatgaggagcttgatgcgggaaagggtgtggtgttcacaagaggggatttggctgccagagctaagattccaaagcaagatgtttctccctatgctgtcgctccctgccttcacaaaacaaaactcaacgaaaaggagatgcagaccttggttgacaaagattgggcttccgtttttggctcaaagaatggcatgccggagatcaactacaaactctgcgcacgtaagatgctcatgattgatagagtcaccagcattgaccataagggaggtgtgtacggtttgggtcagttggttggtgagaaaatcttggagagggaccattggtacttcccatgccattttgttaaggatcaagtcatggctggatctcttgtcagcgacggttgttcacaaatgctcaagatgtacatgatctggctcggtttgcaccttaccaccggaccatttgacttcagacccgtcaacggacacccgaacaaagttaggtgtaggggtcagatatctcctcataagggaaagttggtctacgtcatggagatcaaagagatgggattcgacgaggataacgatccgtacgccattgctgacgtcaacatcattgacgttgatttcgaaaagggtcaagatttcagccttgatagaatcagcgactacggaaagggggatcttaacaaaaagatcgtcgtggacttcaagggcattgctctcaagatgcagaagagatccacgaacaagaacccctccaaagttcagcccgtttttgctaacggtgcagccactgtgggaccggaagcgtccaaggccagctctggtgccagtgctagtgcttctgctgcccctgcgaagcctgctttctcagcagatgttcttgcgccaaagccagttgcacttcctgaacatatcctcaagggtgacgctctcgctccgaaagaaatgtcctggcatcccatgtcaaaacttcctggcaacccgacgccgttcttctcccctagttcttaccctccgagggcaatttgcttcatccctttccctggcaacccacttgacaacaattgcaaagctggagaaatgcctctgaactggtacaacatgtcagagttcatgtgtggaaaagttagcaactgcttgggaccagagttcgcaagatttgataagtcaaatacgagcagaagccctgcttttgatttggctcttgtgactagagttgttgaagtcacaaacatggaacatggcaagttcctgaatgttgattgcaatcccagcaaaggcacaatggtgggggagtttgactgtcctcaagatgcgtggttctttgatggttcttgcaatgatgggcacatgccttattccatcatcatggaaatcggacttcagacatccggtgttctcaccagtgtgttgaaagcaccactgacgatggacaaagatgacattctctttaggaaccttgatgcaagtgctgaaatggtgaggccagatgtggatgtgagggggaaaaccataaggaatgtgaccaagtgcactggatatgcaatgttgggaaagatggggattcacagattcacgtttgagttgtctgttgatggcgtggttttctacaaaggaagcacttcctttggatggttcactccagaggtgtttgctcagcaagctggacttgacaatgggaaaaagacggagccttggtgcaaaactaacaacacgagtgtgagaagagttgaaatcgcatcagccaaaggcaaagaacagctgactgagaaacttccagatgcaactaatgctcaagttctcagaaggtcagaacagtgtgagtatttggattacctcaacattgctcctgattctgggctgcatgggaaaggatatgcgcatggacacaaagatgttaacccacaagactggttcttctcttgtcacttttggtttgatcctgtgatgcctggatctttgggaattgagtcaatgttccagctcattgaggcatttgcggtggaccagaacataccgggagaatacaatgtgagcaatccgacctttgcccatgcccctggaaaaacggcgtggaagtaccgtggtcaattgacaccaaagaaccgtgcgatggactgtgaggtgcacatagtttcaatcacagcctctcctgaaaatggaggctacgttgacatagtggcagatggagcactttgggttgatggtctccgtgtgtatgaagccaaagaactcagagttcgtgttgtcagtgcaaaacctcaagccattccggatgttcaacaacagccacccagcgcaaaagcggaccctgggaaaactggagttgcactcagtccgactcagttgagagatgtcctgcttgaagtggacaatccattgtatcttggtgttgaaaactccaatttggtgcagtttgaatccaaacctgcaacttcttcaaggattgtcagtatcaaaccatgctccataagtgatcttggtgacaagtccttcatggaaacgtacaatgtgtcagcacctctgtacactggagcaatggccaagggaattgcgtctgcggaccttgtcattgctgctgggaagaggaagatattgggttcttttggagcgggtgggcttccaatgcaccatgtgagggcagctttggagaagatacaagcggctctgcctcaaggaccatatgctgtgaacctcattcattcaccttttgacagcaacttggaaaaggggaatgttgatctcttcctcgaaaagggcgttactgtggtggaggcttctgcattcatgaccctcactccccaagttgttcgttaccgtgcagccggactctcaaggaacgctgatgggagtgtcaacatcagaaaccgtatcattggaaaagtgtccagaacagaactcgccgaaatgttcatcagaccggctccggaacacctccttgagaaactcatagcttctggtgagataacacaagaacaagccgaacttgcccgtcgtgttcctgtcgcagacgacatcgctgttgaagctgattctggtggtcacactgacaaccgtcccatccacgtcatcttgcctttgatcatcaaccttaggaacagactgcacagagagtgtggttatcctgcgcaccttagagtcagagttggagctggaggcggtgttggctgcccacaagctgctgcggctgccctcacaatgggagctgccttcatagtgactgggactgtcaatcaagttgctaaacagtccgggacatgtgacaacgtgagaaaacaactcagtcaagccacctacagtgacatttgcatggctccagcagctgatatgtttgaggaaggtgtgaaactccaagttctcaagaagggaacaatgttcccatcaagagctaacaaattgtacgaactcttttgcaagtacgactctttcgattcaatgcctcctgctgaacttgaaaggatcgagaagaggatcttcaagagggcacttcaagaggtctgggaagagaccaaggacttttacatcaatggtttgaagaatccagagaagatacagagagcggaacatgaccccaaactcaagatgtctttgtgtttcagatggtatcttggtcttgcatcacgttgggccaacatgggtgctcctgatcgtgtcatggactatcaagtctggtgtggtccagccattggagccttcaatgacttcatcaaaggaacatatcttgatcctgctgtctctaatgagtacccatgtgttgtccagatcaaccttcagattttgcgtggtgcatgttacctgaggcgtcttaatgctctgagaaatgatccgaggattgatcttgagactgaagatgctgcctttgtctatgagccaacgaatgcgctttgagtagttagcttaatcacttaggtcacccagtccaagcccggcctagcacgatgatcatgagtgttgctattgatgtatgttaatactatacacagtcatcgtgtgtgttttataaaactgtaagcttaggatgtttgaggctaatgtaattagcactacaccgtaataaatgagaggtttactttatgttttaataatgttcttacccttgctgctctctaaactgtaatggcgtacggttagctaaactaaagtaaaaatcgattcgcttgagtaaaattagtgaccgggaaagatcatcgactactactgctcagagatgtaatcggtaattaagacttcaagctcaataattaattaggagtaaatctggcttcgaatttttaaattgtcaacttccaaagaaggattggcaagactcaatctcaattgcccaacaaacatatggctctttacaaatttggaatctctttttgatggcaagaacgtcgtaattcctctgtcgatctcatgtaattaccaaactcatctacttattactttctttatatgcacttactgatgcggccgcttaattaatcacgagtggatgactgtcacgactgactcatgactgactactagtgctagcctcgaggtcgacacaactttgtataataaagttgtctagtctgcttttacatgcgagacacatcttctaaagtaattttaataatagttactatattcaagatttcatatatcaaatactcaatattacttctaaaaaattaattagatataattaaaatattacttttttaattttaagtttaattgttgaatttgtgactattgatttattattctactatgtttaaattgttttatagatagtttaaagtaaatataagtaatgtagtagagtgttagagtgttaccctaaaccataaactataagatttatggtggactaattttcatatatttcttattgcttttaccttttcttggtatgtaagtccgtaactggaattactgtgggttgccatgacactctgtggtcttttggttcatgcatggatcttgcgcaagaaaaagacaaagaacaaagaaaaaagacaaaacagagagacaaaacgcaatcacacaaccaactcaaattagtcactggctgatcaagatcgccgcgtccatgtatgtctaaatgccatgcaaagcaacacgtgcttaacatgcactttaaatggctcacccatctcaacccacacacaaacacattgcctttttcttcatcatcaccacaaccacctgtatatattcattctcttccgccacctcaatttcttcacttcaacacacgtcaacctgcatatgcgtgtcatcccatgcccaaatctccatgcatgttccaaccaccttctctcttatataatacctataaatacctctaatatcactcacttctttcatcatccatccatccagagtactactactctactactataataccccaacccaactcatattcaatactactctaggatccacaaccaaaaatgcttcagcacacttggcttccgaagcctcccaatctgaccctcttgtcagatgaggttcatctctggaggattcctcttgaccagcctgagtcacaacttcaagaccttgctgccaccctgagcagtgatgaattggcgagggcaaacagattctactttccagaacacagaaggcgtttcactgctgggagaggcatcctcagatccatcttgggtggatacttgggagtggaaccgggtcaagtcaagtttgattatgagtcccgtgggaaaccgatccttggtgacagatttgctgagagtggactcctgttcaacttgtctcacagccagaaccttgccttgtgtgctgtcaactacacgcgtcaaataggcattgatcttgaatatctgcgtccaacatctgacttggagtctcttgcaaagaggttctttctcccaagagaatatgaactcttgaggtcactccctgatgagcagaaacagaagattttctttcgttactggacttgcaaagaggcttatctcaaagcaacgggagatggaatagccaaacttgaagagatcgagatagcactcaccccaacagaacctgccaagctccaaacagctcctgcgtggtctctgttggagcttgtgccagatgacaattgtgttgcagctgtggctgttgcgggttttggttggcagcccaagttctggcattactgagtagttagcttaatcacttaggtcacctcgagtatcaaaatctatttagaaatacacaatattttgttgcaggcttgctggagaatcgatctgctatcataaaaattacaaaaaaattttatttgcctcaattattttaggattggtattaaggacgcttaaattatttgtcgggtcactacgcatcattgtgattgagaagatcagcgatacgaaatattcgtagtactatcgataatttatttgaaaattcataagaaaagcaaacgttacatgaattgatgaaacaatacaaagacagataaagccacgcacatttaggatattggccgagattactgaatattgagtaagatcacggaatttctgacaggagcatgtcttcaattcagcccaaatggcagttgaaatactcaaaccgccccatatgcaggagcggatcattcattgtttgtttggttgcctttgccaacatgggagtccaaggttggcgcgccgaattcgcggccgcttaattaactactgtcactgaggccgtagacgagtacggactgatctaactagtgctagcctcgaggtcgacacccagctttcttgtacaaagtggttgcggccgcttaattaaatttaaattcaattaatgcaatcttgattttcaacaacgaaggtaatggcgtaaaagaaaaaatgtatgttattgtattgatctttcatgatgttgaagcgtgccataatatgatgatgtataattaaaatattaactgtcgcattttattgaaatggcactgttatttcaaccatatctttgattctgttacatgacacgactgcaagaagtaaataatagacgccgttgttaaagaattgctatcatatgtgcctaactagagggaatttgagcgtcagacctaatcaaatattacaaaatatctcactctgtcgccagcaatggtgtaatcagcgcagacaaatggcgtaaagatcgcggaaaaacctccccgagtggcatgatagctgcctctgtattgctgatttagtcagccttatttgacttaagggtgccctcgttagtgacaaattgctttcaaggagacagccatgccccacactttgttgaaaaacaaattgcctttggggagacggtaaagccagttgctcttcaataaggaatgtcgaggaggcaatgtaaccgcctctggtagtacacttctctaatccaaaaatcaatttgtattcaagataccgcaaaaaacttatggtttaaaccctgcaggactagtccagaaggtaattatccaagatgtagcatcaagaatccaatgtttacgggaaaaactatggaagtattatgtaagctcagcaagaagcagatcaatatgcggcacatatgcaacctatgttcaaaaatgaagaatgtacagatacaagatcctatactgccagaatacgaagaagaatacgtagaaattgaaaaagaagaaccaggcgaagaaaagaatcttgaagacgtaagcactgacgacaacaatgaaaagaagaagataaggtcggtgattgtgaaagagacatagaggacacatgtaaggtggaaaatgtaagggcggaaagtaaccttatcacaaaggaatcttatcccccactacttatccttttatatttttccgtgtcatttttgcccttgagttttcctatataaggaaccaagttcggcatttgtgaaaacaagaaaaaatttggtgtaagctattttctttgaagtactgaggatacaacttcagagaaatttgtaagtttgtaggtaccagatctggatcccaaaccatgtctccggagaggagaccagttgagattaggccagctacagcagctgatatggccgcggtttgtgatatcgttaaccattacattgagacgtctacagtgaactttaggacagagccacaaacaccacaagagtggattgatgatctagagaggttgcaagatagatacccttggttggttgctgaggttgagggtgttgtggctggtattgcttacgctgggccctggaaggctaggaacgcttacgattggacagttgagagtactgtttacgtgtcacataggcatcaaaggttgggcctaggatctacattgtacacacatttgcttaagtctatggaggcgcaaggttttaagtctgtggttgctgttataggccttccaaacgatccatctgttaggttgcatgaggctttgggatacacagcccggggtacattgcgcgcagctggatacaagcatggtggatggcatgatgttggtttttggcaaagggattttgagttgccagctcctccaaggccagttaggccagttacccaaatctgagtagttagcttaatcacctagagctcgatcggcggcaatagcttcttagcgccatcccgggttgatcctatctgtgttgaaatagttgcggtgggcaaggctctctttcagaaagacaggcggccaaaggaacccaaggtgaggtgggctatggctctcagttccttgtggaagcgcttggtctaaggtgcagaggtgttagcgggatgaagcaaaagtgtccgattgtaacaagatatgttgatcctacgtaaggatattaaagtatgtattcatcactaatataatcagtgtattccaatatgtactacgatttccaatgtctttattgtcgccgtatgtaatcggcgtcacaaaataatccccggtgactttcttttaatccaggatgaaataatatgttattataatttttgcgatttggtccgttataggaattgaagtgtgcttgaggtcggtcgccaccactcccatttcataattttacatgtatttgaaaaataaaaatttatggtattcaatttaaacacgtatacttgtaaagaatgatatcttgaaagaaatatagtttaaatatttattgataaaataacaagtcaggtattatagtccaagcaaaaacataaatttattgatgcaagtttaaattcagaaatatttcaataactgattatatcagctggtacattgccgtagatgaaagactgagtgcgatattatggtgtaatacataggaattcgtttaaacgatctgcgtctaattttcggtccaacttgcacaggaaagacgtcgaccgcggtagctcttgcccagcagactgggcttccagtcctttcgctcgatcgggtccaatgttgtcctcagctgtgaaccggaagcggacgaccaacagtggaagaactgaaaggaacgagccgtctataccttgatgatcggcctctggtgaagggtatcatcgcagccaagcaagctcatgaaaggctgatgggggaggtgtataattatgaggcccacggcgggcttattctttagggaggatctatctcgttgctcaagtgcatggcgcaaagcagttattggagtgcggattttcgttggcatattattcgccacgagttagcagacgaagagaccttcatgaacgtggccaaggccagagttaagcagatgttacgccctgctgcaggcctttctattatccaatagttggttgatctttggaaagagcctcggctgaggcccatactgaaagagatcgatggatatcgatatgccatgttgtttgctagccagaaccagatcacatccgatatgctattgcagcttgacgcagatatggaggataagttgattcatgggatcgctcaggagtagctcatccatgcacgccgacaagaacagaaattccgtcgagttaacgcagccgcttacgacggattcgaaggtcatccattcggaatgtattagtttgcaccagctccgcgtcacacctgtcttcatttgaataagatgttagcaattgtttttagctttgtcttgttgtggcagggcggcaagtgcttcagacatcattctgttttcaaattttatgctggagaacagcttcttaattcctttggaaataatagactgcgtcttaaaattcagatgtctggatatagatatgattgtaaaataacctatttaagtgtcatttagaacataagttttatgaatgttcttccattttcgtcatcgaacgaataagagtaaatacaccttttttaacattacaaataagttcttatacgttgtttatacaccgggaatcatttccattattttcgcgcaaaagtcacggatattcgtgaaagcgacataaactgcgaaatttgcggggagtgtcttgagtttgcctcgaggctagcgcatgcacatagacacacacatcatctcattgatgcttggtaataattgtcattagattgtttttatgcatagatgcactcgaaatcagccaattttagacaagtatcaaacggatgtgacttcagtacattaaaaacgtccgcaatgtgttattaagttgtctaagcgtcaatttgatttacaattgaatatatcctgccccagccagccaacagctcgatttacaattgaatatatcctgccggccggcccacgcgtgtcgaggaattctgatctggcccccatttggacgtgaatgtagacacgtcgaaataaagatttccgaattagaataatttgtttattgctttcgcctataaatacgacggatcgtaatttgtcgttttatcaaaatgtactttcattttataataacgctgcggacatctacatttttgaattgaaaaaaaattggtaattactctttctttttctccatattgaccatcatactcattgctgatccatgtagatttcccggacatgaagccatttacaattgaatatatcctgccgccgctgccgctttgcacccggtggagcttgcatgttggtttctacgcagaactgagccggttaggcagataatttccattgagaactgagccatgtgcaccttccccccaacacggtgagcgacggggcaacggagtgatccacatgggacttttaaacatcatccgtcggatggcgttgcgagagaagcagtcgatccgtgagatcagccgacgcaccgggcaggcgcgcaacacgatcgcaaagtatttgaacgcaggtacaatcgagccgacgttcacgcggaacgaccaagcaagcttggctgccatttttggggtgaggccgttcgcggccgaggggcgcagcccctggggggatgggaggcccgcgttagcgggccgggagggttcgagaagggggggcaccccccttcggcgtgcgcggtcacgcgcacagggcgcagccctggttaaaaacaaggtttataaatattggtttaaaagcaggttaaaagacaggttagcggtggccgaaaaacgggcggaaacccttgcaaatgctggattttctgcctgtggacagcccctcaaatgtcaataggtgcgcccctcatctgtcagcactctgcccctcaagtgtcaaggatcgcgcccctcatctgtcagtagtcgcgcccctcaagtgtcaataccgcagggcacttatccccaggcttgtccacatcatctgtgggaaactcgcgtaaaatcaggcgttttcgccgatttgcgaggctggccagctccacgtcgccggccgaaatcgagcctgcccctcatctgtcaacgccgcgccgggtgagtcggcccctcaagtgtcaacgtccgcccctcatctgtcagtgagggccaagttttccgcgaggtatccacaacgccggcggccgcggtgtctcgcacacggcttcgacggcgtttctggcgcgtttgcagggccatagacggccgccagcccagcggcgagggcaaccagcccggtgagcgtcggaaagggtcgacggatcttttccgctgcataaccctgcttcggggtcattatagcgattttttcggtatatccatcctttttcgcacgatatacaggattttgccaaagggttcgtgtagactttccttggtgtatccaacggcgtcagccgggcaggataggtgaagtaggcccacccgcgagcgggtgttccttcttcactgtcccttattcgcacctggcggtgctcaacgggaatcctgctctgcgaggctggccggctaccgccggcgtaacagatgagggcaagcggatggctgatgaaaccaagccaaccaggaagggcagcccacctatcaaggtgtactgccttccagacgaacgaagagcgattgaggaaaaggcggcggcggccggcatgagcctgtcggcctacctgctggccgtcggccagggctacaaaatcacgggcgtcgtggactatgagcacgtccgcgagctggcccgcatcaatggcgacctgggccgcctgggcggcctgctgaaactctggctcaccgacgacccgcgcacggcgcggttcggtgatgccacgatcctcgccctgctggcgaagatcgaagagaagcaggacgagcttggcaaggtcatgatgggcgtggtccgcccgagggcagagccatgacttttttagccgctaaaacggccggggggtgcgcgtgattgccaagcacgtccccatgcgctccatcaagaagagcgacttcgcggagctggtattcgtgcagggcaagattcggaataccaagtacgagaaggacggccagacggtctacgggaccgacttcattgccgataaggtggattatctggacaccaaggcaccaggcgggtcaaatcaggaataagggcacattgccccggcgtgagtcggggcaatcccgcaaggagggtgaatgaatcggacgtttgaccggaaggcatacaggcaagaactgatcgacgcggggttttccgccgaggatgccgaaaccatcgcaagccgcaccgtcatgcgtgcgccccgcgaaaccttccagtccgtcggctcgatggtccagcaagctacggccaagatcgagcgcgacagcgtgcaactggctccccctgccctgcccgcgccatcggccgccgtggagcgttcgcgtcgtctcgaacaggaggcggcaggtttggcgaagtcgatgaccatcgacacgcgaggaactatgacgaccaagaagcgaaaaaccgccggcgaggacctggcaaaacaggtcagcgaggccaagcaggccgcgttgctgaaacacacgaagcagcagatcaaggaaatgcagctttccttgttcgatattgcgccgtggccggacacgatgcgagcgatgccaaacgacacggcccgctctgccctgttcaccacgcgcaacaagaaaatcccgcgcgaggcgctgcaaaacaaggtcattttccacgtcaacaaggacgtgaagatcacctacaccggcgtcgagctgcgggccgacgatgacgaactggtgtggcagcaggtgttggagtacgcgaagcgcacccctatcggcgagccgatcaccttcacgttctacgagctttgccaggacctgggctggtcgatcaatggccggtattacacgaaggccgaggaatgcctgtcgcgcctacaggcgacggcgatgggcttcacgtccgaccgcgttgggcacctggaatcggtgtcgctgctgcaccgcttccgcgtcctggaccgtggcaagaaaacgtcccgttgccaggtcctgatcgacgaggaaatcgtcgtgctgtttgctggcgaccactacacgaaattcatatgggagaagtaccgcaagctgtcgccgacggcccgacggatgttcgactatttcagctcgcaccgggagccgtacccgctcaagctggaaaccttccgcctcatgtgcggatcggattccacccgcgtgaagaagtggcgcgagcaggtcggcgaagcctgcgaagagttgcgaggcagcggcctggtggaacacgcctgggtcaatgatgacctggtgcattgcaaacgctagggccttgtggggtcagttccggctgggggttcagcagccagcgctttactggcatttcaggaacaagcgggcactgctcgacgcacttgcttcgctcagtatcgctcgggacgcacggcgcgctctacgaactgccgataaacagaggattaaaattgacaattgtgattaaggctcagattcgacggcttggagcggccgacgtgcaggatttccgcgagatccgattgtcggccctgaagaaagctccagagatgttcgggtccgtttacgagcacgaggagaaaaagcccatggaggcgttcgctgaacggttgcgagatgccgtggcattcggcgcctacatcgacggcgagatcattgggctgtcggtcttcaaacaggaggacggccccaaggacgctcacaaggcgcatctgtccggcgttttcgtggagcccgaacagcgaggccgaggggtcgccggtatgctgctgcgggcgttgccggcgggtttattgctcgtgatgatcgtccgacagattccaacgggaatctggtggatgcgcatcttcatcctcggcgcacttaatatttcgctattctggagcttgttgtttatttcggtctaccgcctgccgggcggggtcgcggcgacggtaggcgctgtgcagccgctgatggtcgtgttcatctctgccgctctgctaggtagcccgatacgattgatggcggtcctgggggctatttgcggaactgcgggcgtggcgctgttggtgttgacaccaaacgcagcgctagatcctgtcggcgtcgcagcgggcctggcgggggcggtttccatggcgttcggaaccgtgctgacccgcaagtggcaacctcccgtgcctctgctcacctttaccgcctggcaactggcggccggaggacttctgctcgttccagtagctttagtgtttgatccgccaatcccgatgcctacaggaaccaatgttctcggcctggcgtggctcggcctgatcggagcgggtttaacctacttcctttggttccgggggatctcgcgactcgaacctacagttgtttccttactgggctttctcagcccccgagcgcttagtgggaatttgtaccccttatcgaaccgggagcacaggatgacgcctaacaattcattcaagccgacaccgcttcgcggcgcggcttaattcaggagttaaacatcatgagggaagcggtgatcgccgaagtatcgactcaactatcagaggtagttggcgtcatcgagcgccatctcgaaccgacgttgctggccgtacatttgtacggctccgcagtggatggcggcctgaagccacacagtgatattgatttgctggttacggtgaccgtaaggcttgatgaaacaacgcggcgagctttgatcaacgaccttttggaaacttcggcttcccctggagagagcgagattctccgcgctgtagaagtcaccattgttgtgcacgacgacatcattccgtggcgttatccagctaagcgcgaactgcaatttggagaatggcagcgcaatgacattcttgcaggtatcttcgagccagccacgatcgacattgatctggctatcttgctgacaaaagcaagagaacatagcgttgccttggtaggtccagcggcggaggaactctttgatccggttcctgaacaggatctatttgaggcgctaaatgaaaccttaacgctatggaactcgccgcccgactgggctggcgatgagcgaaatgtagtgcttacgttgtcccgcatttggtacagcgcagtaaccggcaaaatcgcgccgaaggatgtcgctgccgactgggcaatggagcgcctgccggcccagtatcagcccgtcatacttgaagctaggcaggcttatcttggacaagaagatcgcttggcctcgcgcgcagatcagttggaagaatttgttcactacgtgaaaggcgagatcaccaaggtagtcggcaaataatgtctaacaattcgttcaagccgacgccgcttcgcggcgcggcttaactcaagcgttagagagctggggaagactatgcgcgatctgttgaaggtggttctaagcctcgtcttgcgatggcatttcgatccattcccattccgcgctcaagatggcttcccctcggcagttcatcagggctaaatcaatctagccgacttgtccggtgaaatgggctgcactccaacagaaacaatcaaacaaacatacacagcgacttattcacacgagctca

SEQ ID NO: 54 - DNA, 37935 bp, Artificial sequence
  plasmid pDAB109507
gtacaaaaaagcaggcttctagacctaggtggagtcatcacgcagactatctcagcatgtgcgtagcacgcggccgcctcccagtatcattatagtgaaagttttggctctctcgccggtggttttttacctctatttaaaggggttttccacctaaaaattctggtatcattctcactttacttgttactttaatttctcataatctttggttgaaattatcacgcttccgcacacgatatccctacaaatttattatttgttaaacattttcaaaccgcataaaattttatgaagtcccgtctatctttaatgtagtctaacattttcatattgaaatatataatttacttaattttagcgttggtagaaagcataatgatttattcttattcttcttcatataaatgtttaatatacaatataaacaaattctttaccttaagaaggatttcccattttatattttaaaaatatatttatcaaatatttttcaaccacgtaaatctcataataataagttgtttcaaaagtaataaaatttaactccataatttttttattcgactgatcttaaagcaacacccagtgacacaactagccatttttttctttgaataaaaaaatccaattatcattgtattttttttatacaatgaaaatttcaccaaacaatgatttgtggtatttctgaagcaagtcatgttatgcaaaattctataattcccatttgacactacggaagtaactgaagatctgcttttacatgcgagacacatcttctaaagtaattttaataatagttactatattcaagatttcatatatcaaatactcaatattacttctaaaaaattaattagatataattaaaatattacttttttaattttaagtttaattgttgaatttgtgactattgatttattattctactatgtttaaattgttttatagatagtttaaagtaaatataagtaatgtagtagagtgttagagtgttaccctaaaccataaactataagatttatggtggactaattttcatatatttcttattgcttttaccttttcttggtatgtaagtccgtaactggaattactgtgggttgccatgacactctgtggtcttttggttcatgcatggatcttgcgcaagaaaaagacaaagaacaaagaaaaaagacaaaacagagagacaaaacgcaatcacacaaccaactcaaattagtcactggctgatcaagatcgccgcgtccatgtatgtctaaatgccatgcaaagcaacacgtgcttaacatgcactttaaatggctcacccatctcaacccacacacaaacacattgcctttttcttcatcatcaccacaaccacctgtatatattcattctcttccgccacctcaatttcttcacttcaacacacgtcaacctgcatatgcgtgtcatcccatgcccaaatctccatgcatgttccaaccaccttctctcttatataatacctataaatacctctaatatcactcacttctttcatcatccatccatccagagtactactactctactactataataccccaacccaactcatattcaatactactctaggatccacaaccaaaaatggcagcgaggctgcaagagcagaaaggaggtgagatggacacgaggattgcgatcataggcatgagcgccatacttccttgtggaaccacggtgagagagtcatgggagaccataagggctggcattgattgcctgtctgatcttcctgaggatcgtgttgatgtgactgcgtactttgacccagtcaagaccacaaaggacaaaatctactgcaagagaggaggtttcattcctgagtatgactttgatgcgcgtgagtttggtctcaacatgttccagatggaagattctgatgcgaatcagaccatctcacttctcaaggtcaaagaagcacttcaagatgctgggattgatgcacttggaaaggagaagaaaaacataggatgcgtgcttggcattggaggtggacagaagagttcacatgagttctacagcagactcaactatgtggttgtggagaaagtcttgagaaagatggggatgccagaggaagatgtcaaagtggctgtggagaagtacaaagcgaacttcccagaatggagacttgactctttccctggattccttgggaatgtcactgctggcagatgcaccaacacattcaacttggatggcatgaactgcgttgtggatgctgcatgtgcaagctccttgatagcagtcaaggttgcgattgatgaactgctctatggtgactgcgacatgatggtcactggtgcaacctgcacagacaactccattgggatgtacatggctttctcaaagacacctgtgttcagcacggacccaagtgtgagagcgtatgatgagaaaacgaaagggatgctcattggtgagggatcagccatgttggtgctcaaacgttatgcagatgcagtgagggatggtgatgagattcatgctgtgattcgtggttgtgcaagctcaagtgatggcaaagcagctggcatctacactcccacaatcagtggtcaagaggaagccttgagacgtgcatacaatcgtgcctgcgttgaccctgccactgtcactttggttgagggtcatgggactggcactccagttggagataggattgagttgactgcgttgaggaacttgtttgacaaagcgtatggtgaagggaacacagagaaagttgcagttggaagtatcaagtccagtattggtcatttgaaggctgttgctggtcttgctggaatgatcaaggtcatcatggctctcaaacacaagactttgcctggaacgatcaatgtggacaatccacccaatctctatgacaacactcccatcaatgagtcatccctctacatcaacacgatgaacagaccctggttccctccacctggtgttccgagacgtgctggaatatccagctttggctttggaggtgccaactaccatgcagtgttggaagaggctgaaccagagcacacgacagcgtacagactcaacaaacgtccacaaccggtgttgatgatggctgcaactcctgctgcgttgcagagcctttgtgaagctcagctgaaagagtttgaagctgcgatcaaggagaatgagacagtcaagaatactgcctacatcaagtgtgtcaagtttggagaacagttcaagttccctgggagcatacctgcgaccaatgcgagactgggattcttggtcaaagatgcggaggatgcgtgctccacgcttcgtgctatatgtgctcagtttgccaaagatgtgaccaaagaagcgtggaggcttccgagagaaggagtttctttccgtgccaaaggcattgccaccaatggtgctgttgctgcactcttctctggacaaggtgctcagtacacacacatgttcagtgaagttgcgatgaactggcctcagttcagacagtccattgctgcaatggacgctgcacagtccaaggttgctggaagtgacaaagactttgaaagagtctctcaagtcctgtacccaaggaaaccgtacgaacgtgagccagaacaagatcacaagaaaatctcactcacagcatacagccagccgtcaaccctggcatgtgctcttggtgcctttgagattttcaaggaagctggattcactccagactttgcagctggacacagcttgggtgagtttgctgcgctctatgcagctggttgtgttgacagagatgagttgtttgaacttgtttgcagaagggcaaggatcatgggaggcaaagatgcacctgccacacccaaaggttgcatggcagctgtcataggacccaacgcagagaacatcaaggttcaagctgccaacgtctggcttggaaactcaaactctccgtctcagactgtcattactgggtctgttgaagggattcaagctgaaagtgccagattgcagaaggaagggttcagagttgtgcctcttgcttgtgagtctgccttccattctccacagatggaaaatgccagctcagctttcaaagatgtcatatccaaggtttccttccgtacacccaaagcagaaacaaagctcttcagcaatgtttctggagagacctatccgacggatgccagagagatgctcactcaacacatgacctcatctgtgaagttcctgacccaagtgaggaacatgcaccaagctggtgcgagaatctttgttgagtttggaccgaaacaagttctcagcaaacttgtttctgaaaccctcaaagatgacccgtctgttgtcacagtgtctgtgaacccagcttctggcacggactctgacatacagttgagggatgctgcagttcagctggttgtggctggtgtcaatcttcaagggtttgacaagtgggatgctcctgatgccacgaggatgcaagccatcaagaaaaagagaaccacactcagactttcagctgccacctatgtcagtgacaagaccaagaaagtgagggatgctgccatgaacgacggaagatgtgtcacatacctcaagggtgctgcaccactcatcaaggctcctgaacctgtggttgacgaagctgccaagagggaggctgaaaggcttcagaaggagcttcaagacgctcagaggcagcttgacgacgccaaacgtgcagctgcagaagccaactccaaacttgctgctgccaaggaggaagccaagactgctgcagcttcagccaagcctgcagttgacactgctgttgtggagaaacatcgtgccatcctcaagtccatgctggctgagctggatggttatggaagtgttgatgcttcttcccttcagcaacagcaacagcaacagactgctccggcgcctgttaaagccgctgcccctgccgctcccgttgcaagtgctcctgctcccgccgtgtccaacgagttgcttgagaaagctgagacagttgtgatggaggttctcgctgccaagactggatacgaaacagacatgattgaggcggacatggagcttgagactgagttgggaattgacagcatcaagagggttgaaattctttctgaagtccaagctatgcttaacgttgaggcgaaagatgttgatgctctctctaggacgagaacagtgggtgaagttgtcaacgctatgaaggcagaaatcgctggttcttccgctccggcgccggcagctgccgcacctgcaccggctaaagcggctccagctgcagctgcaccagctgtttctaatgagctgctcgaaaaggcagaaactgttgtgatggaagtccttgctgccaaaactggctacgaaactgacatgatagaatcagacatggagcttgagacggagcttggaattgattccatcaagcgtgtggaaatcctcagtgaagtccaagccatgctcaatgtggaagctaaggatgtggatgctctctcaaggaccagaactgtcggtgaggttgtcaatgccatgaaggctgagatagctggaggctccgctcctgcgccggccgctgccgctcctggtcccgctgccgcggctccagctccagctgcagccgctccggccgtctcaaacgaactccttgaaaaagctgagaccgtcgtgatggaggtcttggcagctaaaaccggctatgagactgacatgattgagtctgacatggaattggagacagaacttgggatagacagcatcaaacgtgttgaaatcctcagtgaggtccaagctatgctgaacgtggaagcgaaggatgttgatgctctgtccagaacgaggaccgttggtgaggttgtggatgccatgaaggctgaaattgctggagggtctgcgcccgcgccagctgcagccgctcctgcacccgcagccgcggcacctgctccagctgcacctgcacctgccgtttcttcagaactcttggagaaggctgagacggttgtgatggaggttttggctgcaaagactggctatgagaccgacatgattgaatctgatatggaattggagacagagcttgggatcgattccatcaaaagagtggagatcctgagtgaagtccaagccatgctcaatgttgaagctaaggatgttgatgcactttcaagaacaaggacagtgggtgaggttgtggatgccatgaaggcggagattgctggagggagcgcgcctgcgccagctgccgcggcacctgcaccggcagccgcagctccagctccagctgcaccagcaccggccgcgcccgcgccagctgtttcatccgaactcctggaaaaggccgagacggttgtgatggaggtgctcgcagctaagactggttacgagaccgacatgattgaaagtgacatggagcttgaaaccgagttgggaatagatagcatcaaacgtgttgaaatcttgtctgaggtccaagctatgttgaacgtggaggcaaaagatgtcgatgcgctttcaagaaccagaacagtcggtgaggtcgtggacgccatgaaggctgaaattgccggaagctctgctagtgcgccagctgcagccgcacctgcacctgctgccgcggcacctgctccagctgcagccgctcctgccgtcagcaatgagttgctggagaaagccgaaacagttgtgatggaagtccttgctgcaaaaactggttacgaaacggacatgattgagtcagacatggaattggagaccgaacttggaatagattccatcaagagagtggagatcctctctgaggtgcaagccatgctcaacgttgaggctaaagatgttgatgcactcagtaggacaagaactgtgggggaagttgtcgatgcgatgaaggctgagattgctggaggctctgctcctgcgccggcagctgccgcacctgcacccgcagccgcggcaccagctgtcagcaacgaattgcttgagaaggctgaaacagttgtcatggaagtgctggctgcaaaaaccggctatgagactgacatgattgagtctgacatggaacttgagacggaattgggcattgacagcatcaagcgtgttgagatcctcagtgaagtccaagcaatgctcaatgtggaggctaaggatgtggatgccctctcaaggaccagaacagttggtgaggtcgttgatgcgatgaaggcggagatcgctggaagttccgcgcctgcgccagctgcagccgctcctgcacccgcagccgcggcaccggctccagctgcagccgcaccggccgtctcctcagaactcctggaaaaggctgagacagttgtgatggaagtccttgctgcgaaaactggctatgagaccgacatgattgaatctgacatggaactggagaccgagcttggaattgactccatcaaacgtgttgaaatcctctctgaggttcaagcgatgttgaatgtggaggccaaagatgttgatgctctttccagaacaaggacggtgggagaggtggttgatgccatgaaggctgagatagctgggggttctgctcctgcgccagctgcagccgctcctgctcccgctgccgcggcaccagctgtcagcaacgaactccttgaaaaagctgaaactgttgtgatggaggttttggctgcaaagactggatacgagactgacatgatagagtcagacatggagttggaaacagagcttgggattgatagcatcaagcgtgtggaaatcctttctgaggttcaagccatgctgaacgttgaggccaaagatgtcgatgctttgtcaaggaccagaacggttggagaagtggtcgatgccatgaaggctgagatagctggtggatcagcccctgctccggctgcagccgctcctgcaagtgccggtgctgcaccagctgtgaagattgattcagttcatggtgctgactgtgacgatttgtcactgatgcacgcaaaggtggttgacatcagaaggccagatgaactgattctggaaagaccggagaaccgtccagttcttgtcgttgacgatggctcagagttgacacttgctcttgtgagggtgttgggagcctgtgcagttgtcttgacctttgagggattgcagttggctcagagagctggtgcagctgccattcgtcatgttctggctaaggacctttcagcagaatcagctgagaaggccatcaaagaggctgagcaaagatttggagcgttgggaggcttcataagccagcaagcagaaaggtttgaaccagctgagatactgggtttcacactcatgtgtgcgaagtttgccaaagcctctctctgcactgctgtggctggaggtcgtcctgccttcatcggtgtggctaggcttgacggcagacttggattcacctctcaaggcacttctgacgcactcaagagagcacagcgtggagcgatctttggactctgcaagacaatagggttggagtggtcagaatctgatgtgttcagccgtggtgtggacattgctcaagggatgcacccagaagatgctgcagttgccatagttagggagatggcgtgtgctgacatcagaatcagagaggttgggattggagcaaaccagcaaagatgcacaatcagagctgccaagttggagactgggaaccctcagagacagatagcgaaagacgatgtgcttctggtttctggaggtgctcgtgggatcacacctctttgcatccgtgagatcacgcgtcagattgctggaggcaagtacattctgttgggtcgtagcaaagtttctgcgtctgaaccagcatggtgtgctggcatcactgatgagaaggctgtgcagaaagctgccacccaagagttgaagagggccttcagtgctggtgaaggacccaaacccactccaagggctgtcacgaaacttgtgggatctgttcttggtgctcgtgaagtgagaagctccattgctgccattgaagctctgggtggcaaagcgatctacagctcttgtgatgtgaactctgctgcagatgttgccaaagcagttagggatgcagagtcccagcttggtgccagagttagtggaatcgttcacgcttctggtgtgctccgtgatcgtctcatagagaagaaactccctgacgagtttgatgctgtctttgggaccaaagtcactgggttggagaatcttctggctgcagttgatcgtgccaacctcaaacacatggttctcttcagctcccttgctggtttccacggcaatgttggtcagtctgactatgcgatggcaaacgaagctctcaacaagatgggtttggaacttgcgaaggatgtcagtgtcaagtccatctgctttggtccctgggatggtgggatggtgacacctcaactcaagaaacagtttcaagaaatgggagttcagatcattcctcgtgaaggaggtgctgatacagttgcgaggattgtgttgggatcaagtcctgctgagatccttgttggaaactggaggacaccatccaagaaagttggaagtgacacgatcaccctgcatagaaagatcagtgccaagtccaatcccttcttggaggatcatgtcatacaaggcagaagggtgttgccaatgacccttgctattgggagccttgctgagacctgccttggactcttccctggctactctctctgggccatagatgacgcacagctcttcaaaggtgtcactgttgatggagacgtcaactgtgaagtgaccctcacaccgtccactgctccgagtgggagggtgaatgtccaagcgacgctcaagacgttctcaagtggaaaacttgttccagcctacagagctgtcatagtgttgtccaaccaaggtgctccacctgccaatgcaaccatgcagcctccgagccttgatgcagatcctgctttgcaagggtcagtctatgatggcaagactctctttcatggtcctgcgttcagaggcattgatgacgttctcagctgcaccaagagccagcttgttgccaagtgttctgctgttcctggatcagatgcagccagaggagagtttgcaactgacactgatgcacatgatccctttgtcaatgatcttgcctttcaagcaatgttggtctgggtgaggagaacgctgggacaagctgcactcccgaactccattcagaggatagtccaacacagaccggtcccacaagacaaacccttctacatcaccctcagatccaatcagagtggtggacatagccagcacaaacatgcacttcagttccacaacgaacaaggtgatctcttcattgatgttcaagcctctgtcattgcgacagactcacttgcgttctgagtagttagcttaatcacttaggtcaccagtatgaactaaaatgcatgtaggtgtaagagctcatggagagcatggaatattgtatccgaccatgtaacagtataataactgagctccatctcacttcttctatgaataaacaaaggatgttatgatatattaacactctatctatgcaccttattgttctatgataaatttcctcttattattataaatcatctgaatcgtgacggcttatggaatgcttcaaatagtacaaaaacaaatgtgtactataagactttctaaacaattctaactttagcattgtgaacgagacataagtgttaagaagacataacaattataatggaagaagtttgtctccatttatatattatatattacccacttatgtattatattaggatgttaaggagacataacaattataaagagagaagtttgtatccatttatatattatatactacccatttatatattatacttatccacttatttaatgtctttataaggtttgatccatgatatttctaatattttagttgatatgtatatgaaaaggtactatttgaactctcttactctgtataaaggttggatcatccttaaagtgggtctatttaattttattgcttcttacagataaaaaaaaaattatgagttggtttgataaaatattgaaggatttaaaataataataaataataaataacatataatatatgtatataaatttattataatataacatttatctataaaaaagtaaatattgtcataaatctatacaatcgtttagccttgctggaacgaatctcaattatttaaacgagagtaaacatatttgactttttggttatttaacaaattattatttaacactatatgaaattttttttttttatcagcaaagaataaaattaaattaagaaggacaatggtgtcccaatccttatacaaccaacttccacaagaaagtcaagtcagagacaacaaaaaaacaagcaaaggaaattttttaatttgagttgtcttgtttgctgcataatttatgcagtaaaacactacacataacccttttagcagtagagcaatggttgaccgtgtgcttagcttcttttattttatttttttatcagcaaagaataaataaaataaaatgagacacttcagggatgtttcaacccttatacaaaaccccaaaaacaagtttcctagcaccctaccaacgaattcgcggccgcttaattaagatgagtgatactcaggactcaggactcactctgctgatcactagtgctagcctcgaggtcgacacaactttgtatacaaaagttgtctagacctaggttaattaagcggccgcagcttatttctcttttcgatactctaattgagccgtgcgctctatctagaccaattagaattgatggagctctaaaggttgctggctgttttcttgttcatatgattaacttctaaacttgtgtataaatattctctgaaagtgcttcttttggcatatgtaggttgggcaaaaacgaggaagattgcttctcaatttggaagatgatgaacagccgaagaagaaaataagaataggcagtcctgctactcaatggatctcagtctataacggtcgtcgtcccatgaaacagaggtaacacattttttgcatatacactttgatagttcctcactaactgtgtaatcttttggtagatatcactacaatgttggagagacaaggctgcgccagcatatacagaagggaaatgaagatggccttttgattagctgtgtagcatcagcagctaatctctgggctctcatcatggatgctggaactggattcacttctcaagtttatgagttgtcaccggtcttcctacacaaggtaataatcagttgaagcaattaagaatcaatctgatttgtagtaaactaagaagaacttaccttatgatttccccgcaggactggattatggaacaatgggaaaagaactactatataagctccatagcgggttcagataacgggagctctttagttgttatgtcaaaaggttagtgtttagtgaataataaacttattatcaaaaagtcttcattgacttatttatatacttgttgtgaattggtaggaactacttattctcagcagtcatacaaagtgagtgactcatttccattcaagtggataaataagaaatggaaagaagattttcatgtaacctccatgacaactgctggtaatcgttggggtgtggtaatgtcgaggaactctggcttctctgatcaggtaggtttttgtctcttattgtctggtgtttttattttcccctgatagtctaatatgataaactctgcgttgtgaaaggtggtggagcttgactttttgtacccaagcgatgggatacataggaggtgggagaatgggtatagaataacatcaatggcagcaactgcggatcaagcagctttcatattaagcataccaaagcgtaagatggtggatgaaactcaagagactctccgcaccaccgcctttccaagtactcatgtcaaggttggtttctttagctttgaacacagatttggatctttttgttttgtttccatatacataggacctgagagcttttggttgaattttttttttttcaggacaaatgggcgaagaatctgtacattgcatcaatatgctatggcaggacagtgtgctgatgatacacacttaagcatcatgtgttgtgttagaaagccgaagacaattggagcgagcctcagggtcgtcataataccaatcaaagacgtaaaaccagacgcagtctctttggttgaatgtgatgaaagggatgtgtcttggtatgtatgtacgagtaacaaaagagaagatgcaattgagtagtagaaagatttgagagctttttaaagcccttcaagtgtgtgcttttatcttattgatatcatccatttgcgttgtttaatgcgtctttagatatgtttctgtttctttctcagtgtctgaatatctgataagtgcaatgtgagaaagccacaccaaaccaaaatattcaaatcttatatttttaataatgtcgaatcactcggagttgccaccttctgtgccaattgtgctgaatctatcacactaaaaaaaacatttcttcaaggtaatgacttgtggactatgttctgaattctcattaagtttttattttttgaagtttaagtttttaccttcttttttgaaaaatatcgttcataagatgtcacgccaggacatgagctacacatcacatattagcatgcagatgcggacgatttgtcactcacttcaaacacctaaaagagcttctctctcacagcacacacacatatgcatgcaatatttacacgtgatcgccatgcaaatctccattctcacctataaattagaggctcggcttcactttttactcaaaccaaaactcatcactacaagatccacaaccaaaaatggctgcaaggaacgtgagtgcggctcatgagatgcatgacgagaagaggatagctgttgtgggcatggctgttcagtatgctggatgcaaaacgaaagacgagttctgggaagttctcatgaatggaaaagttgagagcaaagtgatcagcgacaaacgtcttggttcaaattaccgtgctgaacactacaaagctgaaaggagcaagtatgctgacaccttctgcaatgagacatatggaactcttgatgagaacgaaatagacaatgagcatgaactccttttgaaccttgccaaacaagccttggctgaaacatctgtcaaagattcaacaagatgtggcatagtttctggatgcctcagcttcccgatggacaacctccaaggtgaactcttgaatgtgtaccagaaccatgttgagaagaaacttggtgccagagttttcaaagatgcctctcactggtcagaaagagaacagtccaacaaaccagaggctggtgacagaagaatcttcatggaccctgcttcctttgttgctgaggaactcaatcttggcgctctccactactctgttgatgctgcctgtgccactgcgctctatgtgctcagactggcgcaagatcacttggtctctggtgcagctgatgtgatgctttgtggtgcaacatgcctgccggagccgtttttcatactctctgggttctcaaccttccaagccatgcctgttggaacgggtcagaatgtgtccatgccgctgcacaaagattctcaaggattgacccctggtgaaggaggttccatcatggtcctcaaacgtttggatgacgcaatcagagatggagatcacatctatggaacacttttgggagccaatgtcagcaacagtggcactggtctgccacttaaaccccttttgccgtcagagaaaaagtgcctcatggacacctacacacgtatcaatgtgcatccccacaagattcagtatgttgaatgccatgcaactgggactccacaaggtgatcgtgtggaaattgatgctgtgaaggcttgctttgaaggcaaagtcccacgttttggaaccacaaaagggaactttggacacacattggtggcagctgggtttgctggcatgtgcaaagtgcttctctccatgaagcacgggatcattccacccactccgggaatagatgacgaaacgaagatggaccctctggttgtctctggtgaggccattccctggccagaaacgaatggagaaccgaagcgtgctggtctctcagcgtttggatttggtgggaccaatgctcatgctgtctttgaggaacatgacccaagcaatgctgcatgcactggccatgactccatttctgctctctctgcacgttgtggtggtgagtcaaacatgagaatagcaatcactgggatggatgccacttttggtgctttgaaaggattggatgcttttgaaagggccatctacactggtgctcatggtgctataccactcccagaaaagagatggagattcctggggaaagacaaggacttccttgatctttgtggagtcaaagcaacaccgcatggctgttacattgaagatgttgaagttgatttccagaggctgaggactccaatgactcctgaagatatgctcttgcctcaacagcttctggctgtcaccacaattgatagggccatattggactctggcatgaagaaaggtggaaatgtggctgtctttgtggggttggggaccgatcttgaactctaccgtcaccgtgcaagggttgctctcaaggagagagtgaggcctgaagccagcaagaaactcaatgacatgatgcagtacatcaatgattgtgggacaagcacttcttacaccagctacataggcaacttggttgcaacaagggtcagttcacaatggggcttcacgggaccttccttcacaatcacagaaggcaacaattctgtgtacagatgtgctgaacttggcaaatacctcttggaaacgggagaggttgatggggttgtggttgcgggtgttgatctctgtgggagtgctgagaacctttacgtcaagtcaaggcgtttcaaggtgtctacatctgacaccccgagagccagctttgatgcagctgctgatggttactttgttggagagggctgtggtgcatttgtgctcaagcgtgagacaagctgcaccaaggatgacagaatctatgcttgcatggatgccatagttcctggaaatgttccatctgcatgtttgagagaggcattggatcaagccagagtcaagcctggagacatcgagatgttggagctttctgctgattcagcgaggcatttgaaggacccgtctgttctcccaaaggaactcactgctgaggaagagattggcggacttcagacgattcttcgtgacgatgacaagctcccaaggaatgttgcaactggaagtgtcaaggccactgttggtgacactggttatgcttctggtgctgccagtttgattaaggctgcgctttgcatctacaaccgttacctgcccagcaatggagatgactgggatgaacctgcacctgaagcaccctgggacagcacactctttgcgtgccagacctcaagagcttggttgaagaaccctggtgagagacgttatgcggctgtttccggagtcagtgaaaccagaagttgctacagtgtgctgctttctgaagcagagggacactacgagagagagaacagaatcagtttggatgaggaagcacccaagctcattgtgttgagagcagactcccatgaagagattcttggaagattggacaagataagggaaaggttcttgcagcccacgggtgctgcacccagagagtctgaattgaaggcgcaagcccgtaggatctttcttgaactccttggtgagacccttgcccaagatgcagcttcatctggaagtcagaagccccttgctctcagcttggtctccactccatccaagctccagagagaggtggaacttgcggcaaaaggcattccgagatgtctcaagatgagacgtgattggagttcccctgctggaagcagatatgcgcctgagcctttggccagtgacagagttgccttcatgtatggagaaggaaggagcccttactatggcatcacacaagacattcataggatttggcctgaacttcatgaggtcatcaatgagaaaacaaaccgtctctgggctgaaggtgacagatgggtcatgccaagggccagcttcaagagtgagcttgagtcacaacagcaagagtttgacagaaacatgattgaaatgttccgtcttggaatcctcacctcaattgccttcacaaacctggcgagagatgttctcaacatcacgcccaaagcagcctttggactcagtttgggagagatttccatgatctttgctttctccaagaaaaacggtttgataagcgatcagttgacaaaggatttgagagagtcagatgtctggaacaaagctctggctgttgagttcaatgcgctcagagaagcctggggcattccacagtctgtcccaaaagatgagttctggcaaggttacatagtgaggggaacgaaacaagacatagaagcagccatagcaccagactcaaagtatgtgaggttgaccatcatcaatgatgccaacactgctctcatcagtggaaagcctgatgcatgcaaagctgcgattgctcgtcttggtggcaacatccctgcgcttccagtcactcaaggcatgtgtgggcattgcccagaggtgggaccttacaccaaggacatcgcaaagatccacgccaaccttgagttccctgtggttgatggtcttgatctctggactaccataaaccagaagaggcttgtgccaagagccacgggtgccaaagatgaatgggctccttcatcctttggggagtatgctggacagctctatgagaaacaagccaacttccctcagatagttgaaaccatctacaagcagaactatgatgtgtttgttgaagttgggccaaacaatcacagaagcacagcagtgagaaccacgcttggaccacagagaaaccaccttgctggtgccatagacaagcagaacgaggatgcttggacgacaatagtcaagctcgtggcttcattgaaggctcaccttgttcctggagtgaccatcagtccgctctaccactccaagctcgttgcagaggctgaggcttgttatgctgcgctctgtaaaggtgagaaacccaagaaaaacaagtttgtgagaaagattcagttgaatggcagattcaacagcaaggcagaccccatctcctcagcagaccttgcatccttcccacctgcggaccctgcgattgaagctgccatctcttcaaggatcatgaagcctgtggctccgaaattctatgcgcgtctcaacattgatgagcaagatgagaccagagatccgatcttgaacaaggacaatgcgccttccagctccagctcttccagcagttcctcttccagcagttcatctccgtctcctgctccttcagctccagttcagaagaaagctgccccagctgcggagacaaaagctgttgccagtgctgatgcacttcgtagtgccctgcttgatcttgactccatgcttgcgctcagctctgcaagtgcttctggcaaccttgttgagactgcgccatctgatgccagtgtcattgtccctccgtgcaacattgctgatcttggcagcagagctttcatgaaaacttatggtgtttctgcgcctctgtacaccggtgcaatggccaagggaattgcctctgcggacttggtgatcgcagctggaaggcaaggaatccttgcgtcatttggtgctggaggccttccaatgcaagttgtgcgtgagtccattgaaaagattcaagctgccctgcccaatggaccatatgctgtcaacctcatccattctccttttgacagcaaccttgagaagggaaatgttgatctcttcttggaaaagggtgtcacttttgttgaggcttcagccttcatgacgttgacaccgcaagttgtcagatacagagcggctgggttgacgaggaatgcagatgggtcagtcaacataaggaacagaatcattgggaaagtctccagaactgagctggctgaaatgttcatgcgtcctgcacctgagcatcttttgcagaagctcattgcttctggggagatcaatcaagaacaagctgagttggccagacgtgttcctgtggctgatgacattgcggttgaagctgattctggtggacacactgacaaccgtccaatccatgtcattctgcctctgattatcaacctgagggataggcttcacagagagtgtggatacccagcaaacctgagggttcgtgttggtgctgggggtggcattgggtgtccccaagctgcgctggcaactttcaacatgggtgcctctttcattgtcactggaacagtgaaccaagttgccaaacaatctgggacgtgtgacaatgtgaggaaacagcttgcgaaagcaacttactcagatgtttgcatggcaccggcagctgacatgtttgaggaaggtgtgaaacttcaagttttgaagaaaggaacaatgttcccttcaagagccaacaaactctatgagttgttctgcaagtatgattcttttgagtccatgcctccagcagagcttgcgagggttgagaaaagaatcttcagtcgtgcattggaagaggtctgggatgagaccaagaacttctacatcaaccgtctccacaacccagagaagatacagagggctgagagggaccccaaactgaagatgtcactgtgtttcagatggtatctgtccctggcttcaaggtgggccaacactggagcttctgacagagtcatggactaccaagtttggtgtggtcctgccattggttcattcaatgatttcatcaaaggaacttaccttgatccggcagtggcaaatgagtacccgtgtgttgtgcagatcaacaaacagattcttagaggagcgtgcttcttgaggcgtcttgaaatactgagaaatgcaaggctttcagatggtgcagctgcacttgtggcgagcattgatgacacatatgtccctgctgagaagctgtgagtagttagcttaatcacttaggtcaccattccaaacgaaatatcctcgagagtgtgtataccacggtgatatgagtgtggttgttgatgtatgttaacactacatagtcatggtgtgtgttccataaataatgtactaatgtaataagaactactccgtagacggtaataaaagagaagtttttttttttactcttgctactttcctataaagtgatgattaacaacagatacaccaaaaagaaaacaattaatctatattcacaatgaagcagtactagtctattgaacatgtcagattttctttttctagatgtctaatcaagccttcaaggctagtgataaaagatcatccaatgggatccaacaaagactcaaatctggttttgatcagatacttcgaaactatttttgtatgcactaaattatgcaagtgttcttttatttggtgaagactctttagaagcaaagaacgataagcagtaataaaaaaaataaagttcagttttaagatttgttattgacttagcggccgcttaattaaactagtgctagcctcgaggtcgaccaacttttctatacaaagttgtctagacctaggactaggcactgagtgactcactgacctgactgagtgactggcggccgcagcttatagtaaagatttttttgttaataaaatgaaagttaatatttatggatttatttgaacatatttacaagtttttgttaataaatttatttacagaagtgttaaatttgaaaatgtgttaaatgagagttaatatttatggatataatattactttatttaaaaataaaatgaatttatattaaaatatgatttggtaaaagatattataaagaggaacttggatgagaaagacgacgatgggcaaaagttgcatggcacaccgcttttgttcagtaacatctgcactgtggcgcctttttcacactcaccatgcatgctgccacgtcagctttcacactatgacaccactggccatacacgttgccacctcagctttctcctcttctcactatgacacgactggccatgcatgcatgcatgctgccacctcagctcccgcctcttcacccgtgtctttctctcatgtcgcagtgctgcgtgccaacctcttctctctataaatagagagaagagaatgatggttaaactcaaaccaaaacaagaaaacatacacaaatagcaaaacggatccacaaccaaaaatggcgcttcgtgtcaagaccaacaagaagccatgttgggagatgaccaaggaggaactgacctctggcaaaactgaggtgttcaactatgaggaactcctggagtttgcagagggtgacatagctaaggtttttggtccggagtttgctgtcatagacaagtaccccagaagggtgaggctgcctgctcgtgaatacctgcttgtgacaagggtcacactcatggatgccgaggtcaacaactacagagttggtgccagaatggtcactgagtatgatcttccagtgaatggcgaattgtctgagggaggtgattgtccctgggcagttctggttgagagtggacagtgcgatttgatgctgatatcatacatgggaattgatttccagaaccaaggtgacagagtttaccgtctgctcaacaccacgttgacattctatggggttgcccatgagggagagacccttgagtatgacatcagagtgaccggttttgccaaacgtttggatggtggcatctccatgttcttctttgagtatgactgctatgtcaatgggaggcttctcattgagatgagagatggctgtgctggcttcttcacaaatgaggagcttgatgcgggaaagggtgtggtgttcacaagaggggatttggctgccagagctaagattccaaagcaagatgtttctccctatgctgtcgctccctgccttcacaaaacaaaactcaacgaaaaggagatgcagaccttggttgacaaagattgggcttccgtttttggctcaaagaatggcatgccggagatcaactacaaactctgcgcacgtaagatgctcatgattgatagagtcaccagcattgaccataagggaggtgtgtacggtttgggtcagttggttggtgagaaaatcttggagagggaccattggtacttcccatgccattttgttaaggatcaagtcatggctggatctcttgtcagcgacggttgttcacaaatgctcaagatgtacatgatctggctcggtttgcaccttaccaccggaccatttgacttcagacccgtcaacggacacccgaacaaagttaggtgtaggggtcagatatctcctcataagggaaagttggtctacgtcatggagatcaaagagatgggattcgacgaggataacgatccgtacgccattgctgacgtcaacatcattgacgttgatttcgaaaagggtcaagatttcagccttgatagaatcagcgactacggaaagggggatcttaacaaaaagatcgtcgtggacttcaagggcattgctctcaagatgcagaagagatccacgaacaagaacccctccaaagttcagcccgtttttgctaacggtgcagccactgtgggaccggaagcgtccaaggccagctctggtgccagtgctagtgcttctgctgcccctgcgaagcctgctttctcagcagatgttcttgcgccaaagccagttgcacttcctgaacatatcctcaagggtgacgctctcgctccgaaagaaatgtcctggcatcccatgtcaaaacttcctggcaacccgacgccgttcttctcccctagttcttaccctccgagggcaatttgcttcatccctttccctggcaacccacttgacaacaattgcaaagctggagaaatgcctctgaactggtacaacatgtcagagttcatgtgtggaaaagttagcaactgcttgggaccagagttcgcaagatttgataagtcaaatacgagcagaagccctgcttttgatttggctcttgtgactagagttgttgaagtcacaaacatggaacatggcaagttcctgaatgttgattgcaatcccagcaaaggcacaatggtgggggagtttgactgtcctcaagatgcgtggttctttgatggttcttgcaatgatgggcacatgccttattccatcatcatggaaatcggacttcagacatccggtgttctcaccagtgtgttgaaagcaccactgacgatggacaaagatgacattctctttaggaaccttgatgcaagtgctgaaatggtgaggccagatgtggatgtgagggggaaaaccataaggaatgtgaccaagtgcactggatatgcaatgttgggaaagatggggattcacagattcacgtttgagttgtctgttgatggcgtggttttctacaaaggaagcacttcctttggatggttcactccagaggtgtttgctcagcaagctggacttgacaatgggaaaaagacggagccttggtgcaaaactaacaacacgagtgtgagaagagttgaaatcgcatcagccaaaggcaaagaacagctgactgagaaacttccagatgcaactaatgctcaagttctcagaaggtcagaacagtgtgagtatttggattacctcaacattgctcctgattctgggctgcatgggaaaggatatgcgcatggacacaaagatgttaacccacaagactggttcttctcttgtcacttttggtttgatcctgtgatgcctggatctttgggaattgagtcaatgttccagctcattgaggcatttgcggtggaccagaacataccgggagaatacaatgtgagcaatccgacctttgcccatgcccctggaaaaacggcgtggaagtaccgtggtcaattgacaccaaagaaccgtgcgatggactgtgaggtgcacatagtttcaatcacagcctctcctgaaaatggaggctacgttgacatagtggcagatggagcactttgggttgatggtctccgtgtgtatgaagccaaagaactcagagttcgtgttgtcagtgcaaaacctcaagccattccggatgttcaacaacagccacccagcgcaaaagcggaccctgggaaaactggagttgcactcagtccgactcagttgagagatgtcctgcttgaagtggacaatccattgtatcttggtgttgaaaactccaatttggtgcagtttgaatccaaacctgcaacttcttcaaggattgtcagtatcaaaccatgctccataagtgatcttggtgacaagtccttcatggaaacgtacaatgtgtcagcacctctgtacactggagcaatggccaagggaattgcgtctgcggaccttgtcattgctgctgggaagaggaagatattgggttcttttggagcgggtgggcttccaatgcaccatgtgagggcagctttggagaagatacaagcggctctgcctcaaggaccatatgctgtgaacctcattcattcaccttttgacagcaacttggaaaaggggaatgttgatctcttcctcgaaaagggcgttactgtggtggaggcttctgcattcatgaccctcactccccaagttgttcgttaccgtgcagccggactctcaaggaacgctgatgggagtgtcaacatcagaaaccgtatcattggaaaagtgtccagaacagaactcgccgaaatgttcatcagaccggctccggaacacctccttgagaaactcatagcttctggtgagataacacaagaacaagccgaacttgcccgtcgtgttcctgtcgcagacgacatcgctgttgaagctgattctggtggtcacactgacaaccgtcccatccacgtcatcttgcctttgatcatcaaccttaggaacagactgcacagagagtgtggttatcctgcgcaccttagagtcagagttggagctggaggcggtgttggctgcccacaagctgctgcggctgccctcacaatgggagctgccttcatagtgactgggactgtcaatcaagttgctaaacagtccgggacatgtgacaacgtgagaaaacaactcagtcaagccacctacagtgacatttgcatggctccagcagctgatatgtttgaggaaggtgtgaaactccaagttctcaagaagggaacaatgttcccatcaagagctaacaaattgtacgaactcttttgcaagtacgactctttcgattcaatgcctcctgctgaacttgaaaggatcgagaagaggatcttcaagagggcacttcaagaggtctgggaagagaccaaggacttttacatcaatggtttgaagaatccagagaagatacagagagcggaacatgaccccaaactcaagatgtctttgtgtttcagatggtatcttggtcttgcatcacgttgggccaacatgggtgctcctgatcgtgtcatggactatcaagtctggtgtggtccagccattggagccttcaatgacttcatcaaaggaacatatcttgatcctgctgtctctaatgagtacccatgtgttgtccagatcaaccttcagattttgcgtggtgcatgttacctgaggcgtcttaatgctctgagaaatgatccgaggattgatcttgagactgaagatgctgcctttgtctatgagccaacgaatgcgctttgagtagttagcttaatcacttaggtcacccagtccaagcccggcctagcacgatgatcatgagtgttgctattgatgtatgttaatactatacacagtcatcgtgtgtgttttataaaactgtaagcttaggatgtttgaggctaatgtaattagcactacaccgtaataaatgagaggtttactttatgttttaataatgttcttacccttgctgctctctaaactgtaatggcgtacggttagctaaactaaagtaaaaatcgattcgcttgagtaaaattagtgaccgggaaagatcatcgactactactgctcagagatgtaatcggtaattaagacttcaagctcaataattaattaggagtaaatctggcttcgaatttttaaattgtcaacttccaaagaaggattggcaagactcaatctcaattgcccaacaaacatatggctctttacaaatttggaatctctttttgatggcaagaacgtcgtaattcctctgtcgatctcatgtaattaccaaactcatctacttattactttctttatatgcacttactgatgcggccgcttaattaatcacgagtggatgactgtcacgactgactcatgactgactactagtgctagcctcgaggtcgacacaactttgtataataaagttgtctagacctaggagctgtgctgggtaactcacatgagtcactggtcacatcagcggccgcagatctgattggtaagatatgggtactgtttggtttatatgttttgactattcagtcactatggcccccataaattttaattcggctggtatgtctcggttaagaccggtttgacatggttcatttcagttcaattatgttaatctggcacgtgatatgtttaccttcacacgaacattagtaatgatgggctaatttaagacttaacaggcctagagaggcccatcttattacgtaacggcgtcgtttagagtgcaccaagcttataaatgaaaacgagctacctcgggacatcacgctctttgtacactccgccatctctctctctcgttggagcagatctctctcgtgaatatcgacaatgcttcagcacacttggcttccgaagcctcccaatctgaccctcttgtcagatgaggttcatctctggaggattcctcttgaccagcctgagtcacaacttcaagaccttgctgccaccctgagcagtgatgaattggcgagggcaaacagattctactttccagaacacagaaggcgtttcactgctgggagaggcatcctcagatccatcttgggtggatacttgggagtggaaccgggtcaagtcaagtttgattatgagtcccgtgggaaaccgatccttggtgacagatttgctgagagtggactcctgttcaacttgtctcacagccagaaccttgccttgtgtgctgtcaactacacgcgtcaaataggcattgatcttgaatatctgcgtccaacatctgacttggagtctcttgcaaagaggttctttctcccaagagaatatgaactcttgaggtcactccctgatgagcagaaacagaagattttctttcgttactggacttgcaaagaggcttatctcaaagcaacgggagatggaatagccaaacttgaagagatcgagatagcactcaccccaacagaacctgccaagctccaaacagctcctgcgtggtctctgttggagcttgtgccagatgacaattgtgttgcagctgtggctgttgcgggttttggttggcagcccaagttctggcattactgagtagttagcttaatcacttaggtcaccctatcaaaatctatttagaaatacacaatattttgttgcaggcttgctggagaatcgatctgctatcataaaaattacaaaaaaattttatttgcctcaattattttaggattggtattaaggacgcttaaattatttgtcgggtcactacgcatcattgtgattgagaagatcagcgatacgaaatattcgtagtactatcgataatttatttgaaaattcataagaaaagcaaacgttacatgaattgatgaaacaatacaaagacagataaagccacgcacatttaggatattggccgagattactgaatattgagtaagatcacggaatttctgacaggagcatgtcttcaattcagcccaaatggcagttgaaatactcaaaccgccccatatgcaggagcggatcattcattgtttgtttggttgcctttgccaacatgggagtccaaggttgcggccgcttaattaactactgtcactgaggccgtagacgagtacggactgatctaactagtgctagcctcgaggtcgacacccagctttcttgtacaaagtggttgcggccgcttaattaaatttaaattcaattaatgcaatcttgattttcaacaacgaaggtaatggcgtaaaagaaaaaatgtatgttattgtattgatctttcatgatgttgaagcgtgccataatatgatgatgtataattaaaatattaactgtcgcattttattgaaatggcactgttatttcaaccatatctttgattctgttacatgacacgactgcaagaagtaaataatagacgccgttgttaaagaattgctatcatatgtgcctaactagagggaatttgagcgtcagacctaatcaaatattacaaaatatctcactctgtcgccagcaatggtgtaatcagcgcagacaaatggcgtaaagatcgcggaaaaacctccccgagtggcatgatagctgcctctgtattgctgatttagtcagccttatttgacttaagggtgccctcgttagtgacaaattgctttcaaggagacagccatgccccacactttgttgaaaaacaaattgcctttggggagacggtaaagccagttgctcttcaataaggaatgtcgaggaggcaatgtaaccgcctctggtagtacacttctctaatccaaaaatcaatttgtattcaagataccgcaaaaaacttatggtttaaaccctgcaggactagtccagaaggtaattatccaagatgtagcatcaagaatccaatgtttacgggaaaaactatggaagtattatgtaagctcagcaagaagcagatcaatatgcggcacatatgcaacctatgttcaaaaatgaagaatgtacagatacaagatcctatactgccagaatacgaagaagaatacgtagaaattgaaaaagaagaaccaggcgaagaaaagaatcttgaagacgtaagcactgacgacaacaatgaaaagaagaagataaggtcggtgattgtgaaagagacatagaggacacatgtaaggtggaaaatgtaagggcggaaagtaaccttatcacaaaggaatcttatcccccactacttatccttttatatttttccgtgtcatttttgcccttgagttttcctatataaggaaccaagttcggcatttgtgaaaacaagaaaaaatttggtgtaagctattttctttgaagtactgaggatacaacttcagagaaatttgtaagtttgtaggtaccagatctggatcccaaaccatgtctccggagaggagaccagttgagattaggccagctacagcagctgatatggccgcggtttgtgatatcgttaaccattacattgagacgtctacagtgaactttaggacagagccacaaacaccacaagagtggattgatgatctagagaggttgcaagatagatacccttggttggttgctgaggttgagggtgttgtggctggtattgcttacgctgggccctggaaggctaggaacgcttacgattggacagttgagagtactgtttacgtgtcacataggcatcaaaggttgggcctaggatctacattgtacacacatttgcttaagtctatggaggcgcaaggttttaagtctgtggttgctgttataggccttccaaacgatccatctgttaggttgcatgaggctttgggatacacagcccggggtacattgcgcgcagctggatacaagcatggtggatggcatgatgttggtttttggcaaagggattttgagttgccagctcctccaaggccagttaggccagttacccaaatctgagtagttagcttaatcacctagagctcgatcggcggcaatagcttcttagcgccatcccgggttgatcctatctgtgttgaaatagttgcggtgggcaaggctctctttcagaaagacaggcggccaaaggaacccaaggtgaggtgggctatggctctcagttccttgtggaagcgcttggtctaaggtgcagaggtgttagcgggatgaagcaaaagtgtccgattgtaacaagatatgttgatcctacgtaaggatattaaagtatgtattcatcactaatataatcagtgtattccaatatgtactacgatttccaatgtctttattgtcgccgtatgtaatcggcgtcacaaaataatccccggtgactttcttttaatccaggatgaaataatatgttattataatttttgcgatttggtccgttataggaattgaagtgtgcttgaggtcggtcgccaccactcccatttcataattttacatgtatttgaaaaataaaaatttatggtattcaatttaaacacgtatacttgtaaagaatgatatcttgaaagaaatatagtttaaatatttattgataaaataacaagtcaggtattatagtccaagcaaaaacataaatttattgatgcaagtttaaattcagaaatatttcaataactgattatatcagctggtacattgccgtagatgaaagactgagtgcgatattatggtgtaatacataggaattcgtttaaacgatctgcgtctaattttcggtccaacttgcacaggaaagacgtcgaccgcggtagctcttgcccagcagactgggcttccagtcctttcgctcgatcgggtccaatgttgtcctcagctgtgaaccggaagcggacgaccaacagtggaagaactgaaaggaacgagccgtctataccttgatgatcggcctctggtgaagggtatcatcgcagccaagcaagctcatgaaaggctgatgggggaggtgtataattatgaggcccacggcgggcttattctttagggaggatctatctcgttgctcaagtgcatggcgcaaagcagttattggagtgcggattttcgttggcatattattcgccacgagttagcagacgaagagaccttcatgaacgtggccaaggccagagttaagcagatgttacgccctgctgcaggcctttctattatccaatagttggttgatctttggaaagagcctcggctgaggcccatactgaaagagatcgatggatatcgatatgccatgttgtttgctagccagaaccagatcacatccgatatgctattgcagcttgacgcagatatggaggataagttgattcatgggatcgctcaggagtagctcatccatgcacgccgacaagaacagaaattccgtcgagttaacgcagccgcttacgacggattcgaaggtcatccattcggaatgtattagtttgcaccagctccgcgtcacacctgtcttcatttgaataagatgttagcaattgtttttagctttgtcttgttgtggcagggcggcaagtgcttcagacatcattctgttttcaaattttatgctggagaacagcttcttaattcctttggaaataatagactgcgtcttaaaattcagatgtctggatatagatatgattgtaaaataacctatttaagtgtcatttagaacataagttttatgaatgttcttccattttcgtcatcgaacgaataagagtaaatacaccttttttaacattacaaataagttcttatacgttgtttatacaccgggaatcatttccattattttcgcgcaaaagtcacggatattcgtgaaagcgacataaactgcgaaatttgcggggagtgtcttgagtttgcctcgaggctagcgcatgcacatagacacacacatcatctcattgatgcttggtaataattgtcattagattgtttttatgcatagatgcactcgaaatcagccaattttagacaagtatcaaacggatgtgacttcagtacattaaaaacgtccgcaatgtgttattaagttgtctaagcgtcaatttgatttacaattgaatatatcctgccccagccagccaacagctcgatttacaattgaatatatcctgccggccggcccacgcgtgtcgaggaattctgatctggcccccatttggacgtgaatgtagacacgtcgaaataaagatttccgaattagaataatttgtttattgctttcgcctataaatacgacggatcgtaatttgtcgttttatcaaaatgtactttcattttataataacgctgcggacatctacatttttgaattgaaaaaaaattggtaattactctttctttttctccatattgaccatcatactcattgctgatccatgtagatttcccggacatgaagccatttacaattgaatatatcctgccgccgctgccgctttgcacccggtggagcttgcatgttggtttctacgcagaactgagccggttaggcagataatttccattgagaactgagccatgtgcaccttccccccaacacggtgagcgacggggcaacggagtgatccacatgggacttttaaacatcatccgtcggatggcgttgcgagagaagcagtcgatccgtgagatcagccgacgcaccgggcaggcgcgcaacacgatcgcaaagtatttgaacgcaggtacaatcgagccgacgttcacgcggaacgaccaagcaagcttggctgccatttttggggtgaggccgttcgcggccgaggggcgcagcccctggggggatgggaggcccgcgttagcgggccgggagggttcgagaagggggggcaccccccttcggcgtgcgcggtcacgcgcacagggcgcagccctggttaaaaacaaggtttataaatattggtttaaaagcaggttaaaagacaggttagcggtggccgaaaaacgggcggaaacccttgcaaatgctggattttctgcctgtggacagcccctcaaatgtcaataggtgcgcccctcatctgtcagcactctgcccctcaagtgtcaaggatcgcgcccctcatctgtcagtagtcgcgcccctcaagtgtcaataccgcagggcacttatccccaggcttgtccacatcatctgtgggaaactcgcgtaaaatcaggcgttttcgccgatttgcgaggctggccagctccacgtcgccggccgaaatcgagcctgcccctcatctgtcaacgccgcgccgggtgagtcggcccctcaagtgtcaacgtccgcccctcatctgtcagtgagggccaagttttccgcgaggtatccacaacgccggcggccgcggtgtctcgcacacggcttcgacggcgtttctggcgcgtttgcagggccatagacggccgccagcccagcggcgagggcaaccagcccggtgagcgtcggaaagggtcgacggatcttttccgctgcataaccctgcttcggggtcattatagcgattttttcggtatatccatcctttttcgcacgatatacaggattttgccaaagggttcgtgtagactttccttggtgtatccaacggcgtcagccgggcaggataggtgaagtaggcccacccgcgagcgggtgttccttcttcactgtcccttattcgcacctggcggtgctcaacgggaatcctgctctgcgaggctggccggctaccgccggcgtaacagatgagggcaagcggatggctgatgaaaccaagccaaccaggaagggcagcccacctatcaaggtgtactgccttccagacgaacgaagagcgattgaggaaaaggcggcggcggccggcatgagcctgtcggcctacctgctggccgtcggccagggctacaaaatcacgggcgtcgtggactatgagcacgtccgcgagctggcccgcatcaatggcgacctgggccgcctgggcggcctgctgaaactctggctcaccgacgacccgcgcacggcgcggttcggtgatgccacgatcctcgccctgctggcgaagatcgaagagaagcaggacgagcttggcaaggtcatgatgggcgtggtccgcccgagggcagagccatgacttttttagccgctaaaacggccggggggtgcgcgtgattgccaagcacgtccccatgcgctccatcaagaagagcgacttcgcggagctggtattcgtgcagggcaagattcggaataccaagtacgagaaggacggccagacggtctacgggaccgacttcattgccgataaggtggattatctggacaccaaggcaccaggcgggtcaaatcaggaataagggcacattgccccggcgtgagtcggggcaatcccgcaaggagggtgaatgaatcggacgtttgaccggaaggcatacaggcaagaactgatcgacgcggggttttccgccgaggatgccgaaaccatcgcaagccgcaccgtcatgcgtgcgccccgcgaaaccttccagtccgtcggctcgatggtccagcaagctacggccaagatcgagcgcgacagcgtgcaactggctccccctgccctgcccgcgccatcggccgccgtggagcgttcgcgtcgtctcgaacaggaggcggcaggtttggcgaagtcgatgaccatcgacacgcgaggaactatgacgaccaagaagcgaaaaaccgccggcgaggacctggcaaaacaggtcagcgaggccaagcaggccgcgttgctgaaacacacgaagcagcagatcaaggaaatgcagctttccttgttcgatattgcgccgtggccggacacgatgcgagcgatgccaaacgacacggcccgctctgccctgttcaccacgcgcaacaagaaaatcccgcgcgaggcgctgcaaaacaaggtcattttccacgtcaacaaggacgtgaagatcacctacaccggcgtcgagctgcgggccgacgatgacgaactggtgtggcagcaggtgttggagtacgcgaagcgcacccctatcggcgagccgatcaccttcacgttctacgagctttgccaggacctgggctggtcgatcaatggccggtattacacgaaggccgaggaatgcctgtcgcgcctacaggcgacggcgatgggcttcacgtccgaccgcgttgggcacctggaatcggtgtcgctgctgcaccgcttccgcgtcctggaccgtggcaagaaaacgtcccgttgccaggtcctgatcgacgaggaaatcgtcgtgctgtttgctggcgaccactacacgaaattcatatgggagaagtaccgcaagctgtcgccgacggcccgacggatgttcgactatttcagctcgcaccgggagccgtacccgctcaagctggaaaccttccgcctcatgtgcggatcggattccacccgcgtgaagaagtggcgcgagcaggtcggcgaagcctgcgaagagttgcgaggcagcggcctggtggaacacgcctgggtcaatgatgacctggtgcattgcaaacgctagggccttgtggggtcagttccggctgggggttcagcagccagcgctttactggcatttcaggaacaagcgggcactgctcgacgcacttgcttcgctcagtatcgctcgggacgcacggcgcgctctacgaactgccgataaacagaggattaaaattgacaattgtgattaaggctcagattcgacggcttggagcggccgacgtgcaggatttccgcgagatccgattgtcggccctgaagaaagctccagagatgttcgggtccgtttacgagcacgaggagaaaaagcccatggaggcgttcgctgaacggttgcgagatgccgtggcattcggcgcctacatcgacggcgagatcattgggctgtcggtcttcaaacaggaggacggccccaaggacgctcacaaggcgcatctgtccggcgttttcgtggagcccgaacagcgaggccgaggggtcgccggtatgctgctgcgggcgttgccggcgggtttattgctcgtgatgatcgtccgacagattccaacgggaatctggtggatgcgcatcttcatcctcggcgcacttaatatttcgctattctggagcttgttgtttatttcggtctaccgcctgccgggcggggtcgcggcgacggtaggcgctgtgcagccgctgatggtcgtgttcatctctgccgctctgctaggtagcccgatacgattgatggcggtcctgggggctatttgcggaactgcgggcgtggcgctgttggtgttgacaccaaacgcagcgctagatcctgtcggcgtcgcagcgggcctggcgggggcggtttccatggcgttcggaaccgtgctgacccgcaagtggcaacctcccgtgcctctgctcacctttaccgcctggcaactggcggccggaggacttctgctcgttccagtagctttagtgtttgatccgccaatcccgatgcctacaggaaccaatgttctcggcctggcgtggctcggcctgatcggagcgggtttaacctacttcctttggttccgggggatctcgcgactcgaacctacagttgtttccttactgggctttctcagcccccgagcgcttagtgggaatttgtaccccttatcgaaccgggagcacaggatgacgcctaacaattcattcaagccgacaccgcttcgcggcgcggcttaattcaggagttaaacatcatgagggaagcggtgatcgccgaagtatcgactcaactatcagaggtagttggcgtcatcgagcgccatctcgaaccgacgttgctggccgtacatttgtacggctccgcagtggatggcggcctgaagccacacagtgatattgatttgctggttacggtgaccgtaaggcttgatgaaacaacgcggcgagctttgatcaacgaccttttggaaacttcggcttcccctggagagagcgagattctccgcgctgtagaagtcaccattgttgtgcacgacgacatcattccgtggcgttatccagctaagcgcgaactgcaatttggagaatggcagcgcaatgacattcttgcaggtatcttcgagccagccacgatcgacattgatctggctatcttgctgacaaaagcaagagaacatagcgttgccttggtaggtccagcggcggaggaactctttgatccggttcctgaacaggatctatttgaggcgctaaatgaaaccttaacgctatggaactcgccgcccgactgggctggcgatgagcgaaatgtagtgcttacgttgtcccgcatttggtacagcgcagtaaccggcaaaatcgcgccgaaggatgtcgctgccgactgggcaatggagcgcctgccggcccagtatcagcccgtcatacttgaagctaggcaggcttatcttggacaagaagatcgcttggcctcgcgcgcagatcagttggaagaatttgttcactacgtgaaaggcgagatcaccaaggtagtcggcaaataatgtctaacaattcgttcaagccgacgccgcttcgcggcgcggcttaactcaagcgttagagagctggggaagactatgcgcgatctgttgaaggtggttctaagcctcgtcttgcgatggcatttcgatccattcccattccgcgctcaagatggcttcccctcggcagttcatcagggctaaatcaatctagccgacttgtccggtgaaatgggctgcactccaacagaaacaatcaaacaaacatacacagcgacttattcacacgagctcaaattacaacggtatatatcctgccagtcagcatcatcacaccaaaagttaggcccgaatagtttgaaattagaaagctcgcaattgaggtctacaggccaaattcgctcttagccgtacaatattactcaccggatcctaaccggtttaattaaggcgcgccatgcccgggcaagcggccgcacaagttt

SEQ ID NO: 55 - DNA, 38239 bp, Artificial sequence
  plasmid pDAB109508
gtacaaaaaagcaggcttctagacctaggtggagtcatcacgcagactatctcagcatgtgcgtagcacgcggccgcctcccagtatcattatagtgaaagttttggctctctcgccggtggttttttacctctatttaaaggggttttccacctaaaaattctggtatcattctcactttacttgttactttaatttctcataatctttggttgaaattatcacgcttccgcacacgatatccctacaaatttattatttgttaaacattttcaaaccgcataaaattttatgaagtcccgtctatctttaatgtagtctaacattttcatattgaaatatataatttacttaattttagcgttggtagaaagcataatgatttattcttattcttcttcatataaatgtttaatatacaatataaacaaattctttaccttaagaaggatttcccattttatattttaaaaatatatttatcaaatatttttcaaccacgtaaatctcataataataagttgtttcaaaagtaataaaatttaactccataatttttttattcgactgatcttaaagcaacacccagtgacacaactagccatttttttctttgaataaaaaaatccaattatcattgtattttttttatacaatgaaaatttcaccaaacaatgatttgtggtatttctgaagcaagtcatgttatgcaaaattctataattcccatttgacactacggaagtaactgaagatctgcttttacatgcgagacacatcttctaaagtaattttaataatagttactatattcaagatttcatatatcaaatactcaatattacttctaaaaaattaattagatataattaaaatattacttttttaattttaagtttaattgttgaatttgtgactattgatttattattctactatgtttaaattgttttatagatagtttaaagtaaatataagtaatgtagtagagtgttagagtgttaccctaaaccataaactataagatttatggtggactaattttcatatatttcttattgcttttaccttttcttggtatgtaagtccgtaactggaattactgtgggttgccatgacactctgtggtcttttggttcatgcatggatcttgcgcaagaaaaagacaaagaacaaagaaaaaagacaaaacagagagacaaaacgcaatcacacaaccaactcaaattagtcactggctgatcaagatcgccgcgtccatgtatgtctaaatgccatgcaaagcaacacgtgcttaacatgcactttaaatggctcacccatctcaacccacacacaaacacattgcctttttcttcatcatcaccacaaccacctgtatatattcattctcttccgccacctcaatttcttcacttcaacacacgtcaacctgcatatgcgtgtcatcccatgcccaaatctccatgcatgttccaaccaccttctctcttatataatacctataaatacctctaatatcactcacttctttcatcatccatccatccagagtactactactctactactataataccccaacccaactcatattcaatactactctaggatccacaaccaaaaatggcagcgaggctgcaagagcagaaaggaggtgagatggacacgaggattgcgatcataggcatgagcgccatacttccttgtggaaccacggtgagagagtcatgggagaccataagggctggcattgattgcctgtctgatcttcctgaggatcgtgttgatgtgactgcgtactttgacccagtcaagaccacaaaggacaaaatctactgcaagagaggaggtttcattcctgagtatgactttgatgcgcgtgagtttggtctcaacatgttccagatggaagattctgatgcgaatcagaccatctcacttctcaaggtcaaagaagcacttcaagatgctgggattgatgcacttggaaaggagaagaaaaacataggatgcgtgcttggcattggaggtggacagaagagttcacatgagttctacagcagactcaactatgtggttgtggagaaagtcttgagaaagatggggatgccagaggaagatgtcaaagtggctgtggagaagtacaaagcgaacttcccagaatggagacttgactctttccctggattccttgggaatgtcactgctggcagatgcaccaacacattcaacttggatggcatgaactgcgttgtggatgctgcatgtgcaagctccttgatagcagtcaaggttgcgattgatgaactgctctatggtgactgcgacatgatggtcactggtgcaacctgcacagacaactccattgggatgtacatggctttctcaaagacacctgtgttcagcacggacccaagtgtgagagcgtatgatgagaaaacgaaagggatgctcattggtgagggatcagccatgttggtgctcaaacgttatgcagatgcagtgagggatggtgatgagattcatgctgtgattcgtggttgtgcaagctcaagtgatggcaaagcagctggcatctacactcccacaatcagtggtcaagaggaagccttgagacgtgcatacaatcgtgcctgcgttgaccctgccactgtcactttggttgagggtcatgggactggcactccagttggagataggattgagttgactgcgttgaggaacttgtttgacaaagcgtatggtgaagggaacacagagaaagttgcagttggaagtatcaagtccagtattggtcatttgaaggctgttgctggtcttgctggaatgatcaaggtcatcatggctctcaaacacaagactttgcctggaacgatcaatgtggacaatccacccaatctctatgacaacactcccatcaatgagtcatccctctacatcaacacgatgaacagaccctggttccctccacctggtgttccgagacgtgctggaatatccagctttggctttggaggtgccaactaccatgcagtgttggaagaggctgaaccagagcacacgacagcgtacagactcaacaaacgtccacaaccggtgttgatgatggctgcaactcctgctgcgttgcagagcctttgtgaagctcagctgaaagagtttgaagctgcgatcaaggagaatgagacagtcaagaatactgcctacatcaagtgtgtcaagtttggagaacagttcaagttccctgggagcatacctgcgaccaatgcgagactgggattcttggtcaaagatgcggaggatgcgtgctccacgcttcgtgctatatgtgctcagtttgccaaagatgtgaccaaagaagcgtggaggcttccgagagaaggagtttctttccgtgccaaaggcattgccaccaatggtgctgttgctgcactcttctctggacaaggtgctcagtacacacacatgttcagtgaagttgcgatgaactggcctcagttcagacagtccattgctgcaatggacgctgcacagtccaaggttgctggaagtgacaaagactttgaaagagtctctcaagtcctgtacccaaggaaaccgtacgaacgtgagccagaacaagatcacaagaaaatctcactcacagcatacagccagccgtcaaccctggcatgtgctcttggtgcctttgagattttcaaggaagctggattcactccagactttgcagctggacacagcttgggtgagtttgctgcgctctatgcagctggttgtgttgacagagatgagttgtttgaacttgtttgcagaagggcaaggatcatgggaggcaaagatgcacctgccacacccaaaggttgcatggcagctgtcataggacccaacgcagagaacatcaaggttcaagctgccaacgtctggcttggaaactcaaactctccgtctcagactgtcattactgggtctgttgaagggattcaagctgaaagtgccagattgcagaaggaagggttcagagttgtgcctcttgcttgtgagtctgccttccattctccacagatggaaaatgccagctcagctttcaaagatgtcatatccaaggtttccttccgtacacccaaagcagaaacaaagctcttcagcaatgtttctggagagacctatccgacggatgccagagagatgctcactcaacacatgacctcatctgtgaagttcctgacccaagtgaggaacatgcaccaagctggtgcgagaatctttgttgagtttggaccgaaacaagttctcagcaaacttgtttctgaaaccctcaaagatgacccgtctgttgtcacagtgtctgtgaacccagcttctggcacggactctgacatacagttgagggatgctgcagttcagctggttgtggctggtgtcaatcttcaagggtttgacaagtgggatgctcctgatgccacgaggatgcaagccatcaagaaaaagagaaccacactcagactttcagctgccacctatgtcagtgacaagaccaagaaagtgagggatgctgccatgaacgacggaagatgtgtcacatacctcaagggtgctgcaccactcatcaaggctcctgaacctgtggttgacgaagctgccaagagggaggctgaaaggcttcagaaggagcttcaagacgctcagaggcagcttgacgacgccaaacgtgcagctgcagaagccaactccaaacttgctgctgccaaggaggaagccaagactgctgcagcttcagccaagcctgcagttgacactgctgttgtggagaaacatcgtgccatcctcaagtccatgctggctgagctggatggttatggaagtgttgatgcttcttcccttcagcaacagcaacagcaacagactgctccggcgcctgttaaagccgctgcccctgccgctcccgttgcaagtgctcctgctcccgccgtgtccaacgagttgcttgagaaagctgagacagttgtgatggaggttctcgctgccaagactggatacgaaacagacatgattgaggcggacatggagcttgagactgagttgggaattgacagcatcaagagggttgaaattctttctgaagtccaagctatgcttaacgttgaggcgaaagatgttgatgctctctctaggacgagaacagtgggtgaagttgtcaacgctatgaaggcagaaatcgctggttcttccgctccggcgccggcagctgccgcacctgcaccggctaaagcggctccagctgcagctgcaccagctgtttctaatgagctgctcgaaaaggcagaaactgttgtgatggaagtccttgctgccaaaactggctacgaaactgacatgatagaatcagacatggagcttgagacggagcttggaattgattccatcaagcgtgtggaaatcctcagtgaagtccaagccatgctcaatgtggaagctaaggatgtggatgctctctcaaggaccagaactgtcggtgaggttgtcaatgccatgaaggctgagatagctggaggctccgctcctgcgccggccgctgccgctcctggtcccgctgccgcggctccagctccagctgcagccgctccggccgtctcaaacgaactccttgaaaaagctgagaccgtcgtgatggaggtcttggcagctaaaaccggctatgagactgacatgattgagtctgacatggaattggagacagaacttgggatagacagcatcaaacgtgttgaaatcctcagtgaggtccaagctatgctgaacgtggaagcgaaggatgttgatgctctgtccagaacgaggaccgttggtgaggttgtggatgccatgaaggctgaaattgctggagggtctgcgcccgcgccagctgcagccgctcctgcacccgcagccgcggcacctgctccagctgcacctgcacctgccgtttcttcagaactcttggagaaggctgagacggttgtgatggaggttttggctgcaaagactggctatgagaccgacatgattgaatctgatatggaattggagacagagcttgggatcgattccatcaaaagagtggagatcctgagtgaagtccaagccatgctcaatgttgaagctaaggatgttgatgcactttcaagaacaaggacagtgggtgaggttgtggatgccatgaaggcggagattgctggagggagcgcgcctgcgccagctgccgcggcacctgcaccggcagccgcagctccagctccagctgcaccagcaccggccgcgcccgcgccagctgtttcatccgaactcctggaaaaggccgagacggttgtgatggaggtgctcgcagctaagactggttacgagaccgacatgattgaaagtgacatggagcttgaaaccgagttgggaatagatagcatcaaacgtgttgaaatcttgtctgaggtccaagctatgttgaacgtggaggcaaaagatgtcgatgcgctttcaagaaccagaacagtcggtgaggtcgtggacgccatgaaggctgaaattgccggaagctctgctagtgcgccagctgcagccgcacctgcacctgctgccgcggcacctgctccagctgcagccgctcctgccgtcagcaatgagttgctggagaaagccgaaacagttgtgatggaagtccttgctgcaaaaactggttacgaaacggacatgattgagtcagacatggaattggagaccgaacttggaatagattccatcaagagagtggagatcctctctgaggtgcaagccatgctcaacgttgaggctaaagatgttgatgcactcagtaggacaagaactgtgggggaagttgtcgatgcgatgaaggctgagattgctggaggctctgctcctgcgccggcagctgccgcacctgcacccgcagccgcggcaccagctgtcagcaacgaattgcttgagaaggctgaaacagttgtcatggaagtgctggctgcaaaaaccggctatgagactgacatgattgagtctgacatggaacttgagacggaattgggcattgacagcatcaagcgtgttgagatcctcagtgaagtccaagcaatgctcaatgtggaggctaaggatgtggatgccctctcaaggaccagaacagttggtgaggtcgttgatgcgatgaaggcggagatcgctggaagttccgcgcctgcgccagctgcagccgctcctgcacccgcagccgcggcaccggctccagctgcagccgcaccggccgtctcctcagaactcctggaaaaggctgagacagttgtgatggaagtccttgctgcgaaaactggctatgagaccgacatgattgaatctgacatggaactggagaccgagcttggaattgactccatcaaacgtgttgaaatcctctctgaggttcaagcgatgttgaatgtggaggccaaagatgttgatgctctttccagaacaaggacggtgggagaggtggttgatgccatgaaggctgagatagctgggggttctgctcctgcgccagctgcagccgctcctgctcccgctgccgcggcaccagctgtcagcaacgaactccttgaaaaagctgaaactgttgtgatggaggttttggctgcaaagactggatacgagactgacatgatagagtcagacatggagttggaaacagagcttgggattgatagcatcaagcgtgtggaaatcctttctgaggttcaagccatgctgaacgttgaggccaaagatgtcgatgctttgtcaaggaccagaacggttggagaagtggtcgatgccatgaaggctgagatagctggtggatcagcccctgctccggctgcagccgctcctgcaagtgccggtgctgcaccagctgtgaagattgattcagttcatggtgctgactgtgacgatttgtcactgatgcacgcaaaggtggttgacatcagaaggccagatgaactgattctggaaagaccggagaaccgtccagttcttgtcgttgacgatggctcagagttgacacttgctcttgtgagggtgttgggagcctgtgcagttgtcttgacctttgagggattgcagttggctcagagagctggtgcagctgccattcgtcatgttctggctaaggacctttcagcagaatcagctgagaaggccatcaaagaggctgagcaaagatttggagcgttgggaggcttcataagccagcaagcagaaaggtttgaaccagctgagatactgggtttcacactcatgtgtgcgaagtttgccaaagcctctctctgcactgctgtggctggaggtcgtcctgccttcatcggtgtggctaggcttgacggcagacttggattcacctctcaaggcacttctgacgcactcaagagagcacagcgtggagcgatctttggactctgcaagacaatagggttggagtggtcagaatctgatgtgttcagccgtggtgtggacattgctcaagggatgcacccagaagatgctgcagttgccatagttagggagatggcgtgtgctgacatcagaatcagagaggttgggattggagcaaaccagcaaagatgcacaatcagagctgccaagttggagactgggaaccctcagagacagatagcgaaagacgatgtgcttctggtttctggaggtgctcgtgggatcacacctctttgcatccgtgagatcacgcgtcagattgctggaggcaagtacattctgttgggtcgtagcaaagtttctgcgtctgaaccagcatggtgtgctggcatcactgatgagaaggctgtgcagaaagctgccacccaagagttgaagagggccttcagtgctggtgaaggacccaaacccactccaagggctgtcacgaaacttgtgggatctgttcttggtgctcgtgaagtgagaagctccattgctgccattgaagctctgggtggcaaagcgatctacagctcttgtgatgtgaactctgctgcagatgttgccaaagcagttagggatgcagagtcccagcttggtgccagagttagtggaatcgttcacgcttctggtgtgctccgtgatcgtctcatagagaagaaactccctgacgagtttgatgctgtctttgggaccaaagtcactgggttggagaatcttctggctgcagttgatcgtgccaacctcaaacacatggttctcttcagctcccttgctggtttccacggcaatgttggtcagtctgactatgcgatggcaaacgaagctctcaacaagatgggtttggaacttgcgaaggatgtcagtgtcaagtccatctgctttggtccctgggatggtgggatggtgacacctcaactcaagaaacagtttcaagaaatgggagttcagatcattcctcgtgaaggaggtgctgatacagttgcgaggattgtgttgggatcaagtcctgctgagatccttgttggaaactggaggacaccatccaagaaagttggaagtgacacgatcaccctgcatagaaagatcagtgccaagtccaatcccttcttggaggatcatgtcatacaaggcagaagggtgttgccaatgacccttgctattgggagccttgctgagacctgccttggactcttccctggctactctctctgggccatagatgacgcacagctcttcaaaggtgtcactgttgatggagacgtcaactgtgaagtgaccctcacaccgtccactgctccgagtgggagggtgaatgtccaagcgacgctcaagacgttctcaagtggaaaacttgttccagcctacagagctgtcatagtgttgtccaaccaaggtgctccacctgccaatgcaaccatgcagcctccgagccttgatgcagatcctgctttgcaagggtcagtctatgatggcaagactctctttcatggtcctgcgttcagaggcattgatgacgttctcagctgcaccaagagccagcttgttgccaagtgttctgctgttcctggatcagatgcagccagaggagagtttgcaactgacactgatgcacatgatccctttgtcaatgatcttgcctttcaagcaatgttggtctgggtgaggagaacgctgggacaagctgcactcccgaactccattcagaggatagtccaacacagaccggtcccacaagacaaacccttctacatcaccctcagatccaatcagagtggtggacatagccagcacaaacatgcacttcagttccacaacgaacaaggtgatctcttcattgatgttcaagcctctgtcattgcgacagactcacttgcgttctgagtagttagcttaatcacttaggtcaccagtatgaactaaaatgcatgtaggtgtaagagctcatggagagcatggaatattgtatccgaccatgtaacagtataataactgagctccatctcacttcttctatgaataaacaaaggatgttatgatatattaacactctatctatgcaccttattgttctatgataaatttcctcttattattataaatcatctgaatcgtgacggcttatggaatgcttcaaatagtacaaaaacaaatgtgtactataagactttctaaacaattctaactttagcattgtgaacgagacataagtgttaagaagacataacaattataatggaagaagtttgtctccatttatatattatatattacccacttatgtattatattaggatgttaaggagacataacaattataaagagagaagtttgtatccatttatatattatatactacccatttatatattatacttatccacttatttaatgtctttataaggtttgatccatgatatttctaatattttagttgatatgtatatgaaaaggtactatttgaactctcttactctgtataaaggttggatcatccttaaagtgggtctatttaattttattgcttcttacagataaaaaaaaaattatgagttggtttgataaaatattgaaggatttaaaataataataaataataaataacatataatatatgtatataaatttattataatataacatttatctataaaaaagtaaatattgtcataaatctatacaatcgtttagccttgctggaacgaatctcaattatttaaacgagagtaaacatatttgactttttggttatttaacaaattattatttaacactatatgaaattttttttttttatcagcaaagaataaaattaaattaagaaggacaatggtgtcccaatccttatacaaccaacttccacaagaaagtcaagtcagagacaacaaaaaaacaagcaaaggaaattttttaatttgagttgtcttgtttgctgcataatttatgcagtaaaacactacacataacccttttagcagtagagcaatggttgaccgtgtgcttagcttcttttattttatttttttatcagcaaagaataaataaaataaaatgagacacttcagggatgtttcaacccttatacaaaaccccaaaaacaagtttcctagcaccctaccaacgaattcgcggccgcttaattaagatgagtgatactcaggactcaggactcactctgctgatcactagtgctagcctcgaggtcgacacaactttgtatacaaaagttgtctagacctaggttaattaagcggccgcagcttatttctcttttcgatactctaattgagccgtgcgctctatctagaccaattagaattgatggagctctaaaggttgctggctgttttcttgttcatatgattaacttctaaacttgtgtataaatattctctgaaagtgcttcttttggcatatgtaggttgggcaaaaacgaggaagattgcttctcaatttggaagatgatgaacagccgaagaagaaaataagaataggcagtcctgctactcaatggatctcagtctataacggtcgtcgtcccatgaaacagaggtaacacattttttgcatatacactttgatagttcctcactaactgtgtaatcttttggtagatatcactacaatgttggagagacaaggctgcgccagcatatacagaagggaaatgaagatggccttttgattagctgtgtagcatcagcagctaatctctgggctctcatcatggatgctggaactggattcacttctcaagtttatgagttgtcaccggtcttcctacacaaggtaataatcagttgaagcaattaagaatcaatctgatttgtagtaaactaagaagaacttaccttatgatttccccgcaggactggattatggaacaatgggaaaagaactactatataagctccatagcgggttcagataacgggagctctttagttgttatgtcaaaaggttagtgtttagtgaataataaacttattatcaaaaagtcttcattgacttatttatatacttgttgtgaattggtaggaactacttattctcagcagtcatacaaagtgagtgactcatttccattcaagtggataaataagaaatggaaagaagattttcatgtaacctccatgacaactgctggtaatcgttggggtgtggtaatgtcgaggaactctggcttctctgatcaggtaggtttttgtctcttattgtctggtgtttttattttcccctgatagtctaatatgataaactctgcgttgtgaaaggtggtggagcttgactttttgtacccaagcgatgggatacataggaggtgggagaatgggtatagaataacatcaatggcagcaactgcggatcaagcagctttcatattaagcataccaaagcgtaagatggtggatgaaactcaagagactctccgcaccaccgcctttccaagtactcatgtcaaggttggtttctttagctttgaacacagatttggatctttttgttttgtttccatatacataggacctgagagcttttggttgaattttttttttttcaggacaaatgggcgaagaatctgtacattgcatcaatatgctatggcaggacagtgtgctgatgatacacacttaagcatcatgtgttgtgttagaaagccgaagacaattggagcgagcctcagggtcgtcataataccaatcaaagacgtaaaaccagacgcagtctctttggttgaatgtgatgaaagggatgtgtcttggtatgtatgtacgagtaacaaaagagaagatgcaattgagtagtagaaagatttgagagctttttaaagcccttcaagtgtgtgcttttatcttattgatatcatccatttgcgttgtttaatgcgtctttagatatgtttctgtttctttctcagtgtctgaatatctgataagtgcaatgtgagaaagccacaccaaaccaaaatattcaaatcttatatttttaataatgtcgaatcactcggagttgccaccttctgtgccaattgtgctgaatctatcacactaaaaaaaacatttcttcaaggtaatgacttgtggactatgttctgaattctcattaagtttttattttttgaagtttaagtttttaccttcttttttgaaaaatatcgttcataagatgtcacgccaggacatgagctacacatcacatattagcatgcagatgcggacgatttgtcactcacttcaaacacctaaaagagcttctctctcacagcacacacacatatgcatgcaatatttacacgtgatcgccatgcaaatctccattctcacctataaattagaggctcggcttcactttttactcaaaccaaaactcatcactacaagatccacaaccaaaaatggctgcaaggaacgtgagtgcggctcatgagatgcatgacgagaagaggatagctgttgtgggcatggctgttcagtatgctggatgcaaaacgaaagacgagttctgggaagttctcatgaatggaaaagttgagagcaaagtgatcagcgacaaacgtcttggttcaaattaccgtgctgaacactacaaagctgaaaggagcaagtatgctgacaccttctgcaatgagacatatggaactcttgatgagaacgaaatagacaatgagcatgaactccttttgaaccttgccaaacaagccttggctgaaacatctgtcaaagattcaacaagatgtggcatagtttctggatgcctcagcttcccgatggacaacctccaaggtgaactcttgaatgtgtaccagaaccatgttgagaagaaacttggtgccagagttttcaaagatgcctctcactggtcagaaagagaacagtccaacaaaccagaggctggtgacagaagaatcttcatggaccctgcttcctttgttgctgaggaactcaatcttggcgctctccactactctgttgatgctgcctgtgccactgcgctctatgtgctcagactggcgcaagatcacttggtctctggtgcagctgatgtgatgctttgtggtgcaacatgcctgccggagccgtttttcatactctctgggttctcaaccttccaagccatgcctgttggaacgggtcagaatgtgtccatgccgctgcacaaagattctcaaggattgacccctggtgaaggaggttccatcatggtcctcaaacgtttggatgacgcaatcagagatggagatcacatctatggaacacttttgggagccaatgtcagcaacagtggcactggtctgccacttaaaccccttttgccgtcagagaaaaagtgcctcatggacacctacacacgtatcaatgtgcatccccacaagattcagtatgttgaatgccatgcaactgggactccacaaggtgatcgtgtggaaattgatgctgtgaaggcttgctttgaaggcaaagtcccacgttttggaaccacaaaagggaactttggacacacattggtggcagctgggtttgctggcatgtgcaaagtgcttctctccatgaagcacgggatcattccacccactccgggaatagatgacgaaacgaagatggaccctctggttgtctctggtgaggccattccctggccagaaacgaatggagaaccgaagcgtgctggtctctcagcgtttggatttggtgggaccaatgctcatgctgtctttgaggaacatgacccaagcaatgctgcatgcactggccatgactccatttctgctctctctgcacgttgtggtggtgagtcaaacatgagaatagcaatcactgggatggatgccacttttggtgctttgaaaggattggatgcttttgaaagggccatctacactggtgctcatggtgctataccactcccagaaaagagatggagattcctggggaaagacaaggacttccttgatctttgtggagtcaaagcaacaccgcatggctgttacattgaagatgttgaagttgatttccagaggctgaggactccaatgactcctgaagatatgctcttgcctcaacagcttctggctgtcaccacaattgatagggccatattggactctggcatgaagaaaggtggaaatgtggctgtctttgtggggttggggaccgatcttgaactctaccgtcaccgtgcaagggttgctctcaaggagagagtgaggcctgaagccagcaagaaactcaatgacatgatgcagtacatcaatgattgtgggacaagcacttcttacaccagctacataggcaacttggttgcaacaagggtcagttcacaatggggcttcacgggaccttccttcacaatcacagaaggcaacaattctgtgtacagatgtgctgaacttggcaaatacctcttggaaacgggagaggttgatggggttgtggttgcgggtgttgatctctgtgggagtgctgagaacctttacgtcaagtcaaggcgtttcaaggtgtctacatctgacaccccgagagccagctttgatgcagctgctgatggttactttgttggagagggctgtggtgcatttgtgctcaagcgtgagacaagctgcaccaaggatgacagaatctatgcttgcatggatgccatagttcctggaaatgttccatctgcatgtttgagagaggcattggatcaagccagagtcaagcctggagacatcgagatgttggagctttctgctgattcagcgaggcatttgaaggacccgtctgttctcccaaaggaactcactgctgaggaagagattggcggacttcagacgattcttcgtgacgatgacaagctcccaaggaatgttgcaactggaagtgtcaaggccactgttggtgacactggttatgcttctggtgctgccagtttgattaaggctgcgctttgcatctacaaccgttacctgcccagcaatggagatgactgggatgaacctgcacctgaagcaccctgggacagcacactctttgcgtgccagacctcaagagcttggttgaagaaccctggtgagagacgttatgcggctgtttccggagtcagtgaaaccagaagttgctacagtgtgctgctttctgaagcagagggacactacgagagagagaacagaatcagtttggatgaggaagcacccaagctcattgtgttgagagcagactcccatgaagagattcttggaagattggacaagataagggaaaggttcttgcagcccacgggtgctgcacccagagagtctgaattgaaggcgcaagcccgtaggatctttcttgaactccttggtgagacccttgcccaagatgcagcttcatctggaagtcagaagccccttgctctcagcttggtctccactccatccaagctccagagagaggtggaacttgcggcaaaaggcattccgagatgtctcaagatgagacgtgattggagttcccctgctggaagcagatatgcgcctgagcctttggccagtgacagagttgccttcatgtatggagaaggaaggagcccttactatggcatcacacaagacattcataggatttggcctgaacttcatgaggtcatcaatgagaaaacaaaccgtctctgggctgaaggtgacagatgggtcatgccaagggccagcttcaagagtgagcttgagtcacaacagcaagagtttgacagaaacatgattgaaatgttccgtcttggaatcctcacctcaattgccttcacaaacctggcgagagatgttctcaacatcacgcccaaagcagcctttggactcagtttgggagagatttccatgatctttgctttctccaagaaaaacggtttgataagcgatcagttgacaaaggatttgagagagtcagatgtctggaacaaagctctggctgttgagttcaatgcgctcagagaagcctggggcattccacagtctgtcccaaaagatgagttctggcaaggttacatagtgaggggaacgaaacaagacatagaagcagccatagcaccagactcaaagtatgtgaggttgaccatcatcaatgatgccaacactgctctcatcagtggaaagcctgatgcatgcaaagctgcgattgctcgtcttggtggcaacatccctgcgcttccagtcactcaaggcatgtgtgggcattgcccagaggtgggaccttacaccaaggacatcgcaaagatccacgccaaccttgagttccctgtggttgatggtcttgatctctggactaccataaaccagaagaggcttgtgccaagagccacgggtgccaaagatgaatgggctccttcatcctttggggagtatgctggacagctctatgagaaacaagccaacttccctcagatagttgaaaccatctacaagcagaactatgatgtgtttgttgaagttgggccaaacaatcacagaagcacagcagtgagaaccacgcttggaccacagagaaaccaccttgctggtgccatagacaagcagaacgaggatgcttggacgacaatagtcaagctcgtggcttcattgaaggctcaccttgttcctggagtgaccatcagtccgctctaccactccaagctcgttgcagaggctgaggcttgttatgctgcgctctgtaaaggtgagaaacccaagaaaaacaagtttgtgagaaagattcagttgaatggcagattcaacagcaaggcagaccccatctcctcagcagaccttgcatccttcccacctgcggaccctgcgattgaagctgccatctcttcaaggatcatgaagcctgtggctccgaaattctatgcgcgtctcaacattgatgagcaagatgagaccagagatccgatcttgaacaaggacaatgcgccttccagctccagctcttccagcagttcctcttccagcagttcatctccgtctcctgctccttcagctccagttcagaagaaagctgccccagctgcggagacaaaagctgttgccagtgctgatgcacttcgtagtgccctgcttgatcttgactccatgcttgcgctcagctctgcaagtgcttctggcaaccttgttgagactgcgccatctgatgccagtgtcattgtccctccgtgcaacattgctgatcttggcagcagagctttcatgaaaacttatggtgtttctgcgcctctgtacaccggtgcaatggccaagggaattgcctctgcggacttggtgatcgcagctggaaggcaaggaatccttgcgtcatttggtgctggaggccttccaatgcaagttgtgcgtgagtccattgaaaagattcaagctgccctgcccaatggaccatatgctgtcaacctcatccattctccttttgacagcaaccttgagaagggaaatgttgatctcttcttggaaaagggtgtcacttttgttgaggcttcagccttcatgacgttgacaccgcaagttgtcagatacagagcggctgggttgacgaggaatgcagatgggtcagtcaacataaggaacagaatcattgggaaagtctccagaactgagctggctgaaatgttcatgcgtcctgcacctgagcatcttttgcagaagctcattgcttctggggagatcaatcaagaacaagctgagttggccagacgtgttcctgtggctgatgacattgcggttgaagctgattctggtggacacactgacaaccgtccaatccatgtcattctgcctctgattatcaacctgagggataggcttcacagagagtgtggatacccagcaaacctgagggttcgtgttggtgctgggggtggcattgggtgtccccaagctgcgctggcaactttcaacatgggtgcctctttcattgtcactggaacagtgaaccaagttgccaaacaatctgggacgtgtgacaatgtgaggaaacagcttgcgaaagcaacttactcagatgtttgcatggcaccggcagctgacatgtttgaggaaggtgtgaaacttcaagttttgaagaaaggaacaatgttcccttcaagagccaacaaactctatgagttgttctgcaagtatgattcttttgagtccatgcctccagcagagcttgcgagggttgagaaaagaatcttcagtcgtgcattggaagaggtctgggatgagaccaagaacttctacatcaaccgtctccacaacccagagaagatacagagggctgagagggaccccaaactgaagatgtcactgtgtttcagatggtatctgtccctggcttcaaggtgggccaacactggagcttctgacagagtcatggactaccaagtttggtgtggtcctgccattggttcattcaatgatttcatcaaaggaacttaccttgatccggcagtggcaaatgagtacccgtgtgttgtgcagatcaacaaacagattcttagaggagcgtgcttcttgaggcgtcttgaaatactgagaaatgcaaggctttcagatggtgcagctgcacttgtggcgagcattgatgacacatatgtccctgctgagaagctgtgagtagttagcttaatcacttaggtcaccattccaaacgaaatatcctcgagagtgtgtataccacggtgatatgagtgtggttgttgatgtatgttaacactacatagtcatggtgtgtgttccataaataatgtactaatgtaataagaactactccgtagacggtaataaaagagaagtttttttttttactcttgctactttcctataaagtgatgattaacaacagatacaccaaaaagaaaacaattaatctatattcacaatgaagcagtactagtctattgaacatgtcagattttctttttctagatgtctaatcaagccttcaaggctagtgataaaagatcatccaatgggatccaacaaagactcaaatctggttttgatcagatacttcgaaactatttttgtatgcactaaattatgcaagtgttcttttatttggtgaagactctttagaagcaaagaacgataagcagtaataaaaaaaataaagttcagttttaagatttgttattgacttagcggccgcttaattaaactagtgctagcctcgaggtcgaccaacttttctatacaaagttgtctagacctaggactaggcactgagtgactcactgacctgactgagtgactggcggccgcagcttatagtaaagatttttttgttaataaaatgaaagttaatatttatggatttatttgaacatatttacaagtttttgttaataaatttatttacagaagtgttaaatttgaaaatgtgttaaatgagagttaatatttatggatataatattactttatttaaaaataaaatgaatttatattaaaatatgatttggtaaaagatattataaagaggaacttggatgagaaagacgacgatgggcaaaagttgcatggcacaccgcttttgttcagtaacatctgcactgtggcgcctttttcacactcaccatgcatgctgccacgtcagctttcacactatgacaccactggccatacacgttgccacctcagctttctcctcttctcactatgacacgactggccatgcatgcatgcatgctgccacctcagctcccgcctcttcacccgtgtctttctctcatgtcgcagtgctgcgtgccaacctcttctctctataaatagagagaagagaatgatggttaaactcaaaccaaaacaagaaaacatacacaaatagcaaaacggatccacaaccaaaaatggcgcttcgtgtcaagaccaacaagaagccatgttgggagatgaccaaggaggaactgacctctggcaaaactgaggtgttcaactatgaggaactcctggagtttgcagagggtgacatagctaaggtttttggtccggagtttgctgtcatagacaagtaccccagaagggtgaggctgcctgctcgtgaatacctgcttgtgacaagggtcacactcatggatgccgaggtcaacaactacagagttggtgccagaatggtcactgagtatgatcttccagtgaatggcgaattgtctgagggaggtgattgtccctgggcagttctggttgagagtggacagtgcgatttgatgctgatatcatacatgggaattgatttccagaaccaaggtgacagagtttaccgtctgctcaacaccacgttgacattctatggggttgcccatgagggagagacccttgagtatgacatcagagtgaccggttttgccaaacgtttggatggtggcatctccatgttcttctttgagtatgactgctatgtcaatgggaggcttctcattgagatgagagatggctgtgctggcttcttcacaaatgaggagcttgatgcgggaaagggtgtggtgttcacaagaggggatttggctgccagagctaagattccaaagcaagatgtttctccctatgctgtcgctccctgccttcacaaaacaaaactcaacgaaaaggagatgcagaccttggttgacaaagattgggcttccgtttttggctcaaagaatggcatgccggagatcaactacaaactctgcgcacgtaagatgctcatgattgatagagtcaccagcattgaccataagggaggtgtgtacggtttgggtcagttggttggtgagaaaatcttggagagggaccattggtacttcccatgccattttgttaaggatcaagtcatggctggatctcttgtcagcgacggttgttcacaaatgctcaagatgtacatgatctggctcggtttgcaccttaccaccggaccatttgacttcagacccgtcaacggacacccgaacaaagttaggtgtaggggtcagatatctcctcataagggaaagttggtctacgtcatggagatcaaagagatgggattcgacgaggataacgatccgtacgccattgctgacgtcaacatcattgacgttgatttcgaaaagggtcaagatttcagccttgatagaatcagcgactacggaaagggggatcttaacaaaaagatcgtcgtggacttcaagggcattgctctcaagatgcagaagagatccacgaacaagaacccctccaaagttcagcccgtttttgctaacggtgcagccactgtgggaccggaagcgtccaaggccagctctggtgccagtgctagtgcttctgctgcccctgcgaagcctgctttctcagcagatgttcttgcgccaaagccagttgcacttcctgaacatatcctcaagggtgacgctctcgctccgaaagaaatgtcctggcatcccatgtcaaaacttcctggcaacccgacgccgttcttctcccctagttcttaccctccgagggcaatttgcttcatccctttccctggcaacccacttgacaacaattgcaaagctggagaaatgcctctgaactggtacaacatgtcagagttcatgtgtggaaaagttagcaactgcttgggaccagagttcgcaagatttgataagtcaaatacgagcagaagccctgcttttgatttggctcttgtgactagagttgttgaagtcacaaacatggaacatggcaagttcctgaatgttgattgcaatcccagcaaaggcacaatggtgggggagtttgactgtcctcaagatgcgtggttctttgatggttcttgcaatgatgggcacatgccttattccatcatcatggaaatcggacttcagacatccggtgttctcaccagtgtgttgaaagcaccactgacgatggacaaagatgacattctctttaggaaccttgatgcaagtgctgaaatggtgaggccagatgtggatgtgagggggaaaaccataaggaatgtgaccaagtgcactggatatgcaatgttgggaaagatggggattcacagattcacgtttgagttgtctgttgatggcgtggttttctacaaaggaagcacttcctttggatggttcactccagaggtgtttgctcagcaagctggacttgacaatgggaaaaagacggagccttggtgcaaaactaacaacacgagtgtgagaagagttgaaatcgcatcagccaaaggcaaagaacagctgactgagaaacttccagatgcaactaatgctcaagttctcagaaggtcagaacagtgtgagtatttggattacctcaacattgctcctgattctgggctgcatgggaaaggatatgcgcatggacacaaagatgttaacccacaagactggttcttctcttgtcacttttggtttgatcctgtgatgcctggatctttgggaattgagtcaatgttccagctcattgaggcatttgcggtggaccagaacataccgggagaatacaatgtgagcaatccgacctttgcccatgcccctggaaaaacggcgtggaagtaccgtggtcaattgacaccaaagaaccgtgcgatggactgtgaggtgcacatagtttcaatcacagcctctcctgaaaatggaggctacgttgacatagtggcagatggagcactttgggttgatggtctccgtgtgtatgaagccaaagaactcagagttcgtgttgtcagtgcaaaacctcaagccattccggatgttcaacaacagccacccagcgcaaaagcggaccctgggaaaactggagttgcactcagtccgactcagttgagagatgtcctgcttgaagtggacaatccattgtatcttggtgttgaaaactccaatttggtgcagtttgaatccaaacctgcaacttcttcaaggattgtcagtatcaaaccatgctccataagtgatcttggtgacaagtccttcatggaaacgtacaatgtgtcagcacctctgtacactggagcaatggccaagggaattgcgtctgcggaccttgtcattgctgctgggaagaggaagatattgggttcttttggagcgggtgggcttccaatgcaccatgtgagggcagctttggagaagatacaagcggctctgcctcaaggaccatatgctgtgaacctcattcattcaccttttgacagcaacttggaaaaggggaatgttgatctcttcctcgaaaagggcgttactgtggtggaggcttctgcattcatgaccctcactccccaagttgttcgttaccgtgcagccggactctcaaggaacgctgatgggagtgtcaacatcagaaaccgtatcattggaaaagtgtccagaacagaactcgccgaaatgttcatcagaccggctccggaacacctccttgagaaactcatagcttctggtgagataacacaagaacaagccgaacttgcccgtcgtgttcctgtcgcagacgacatcgctgttgaagctgattctggtggtcacactgacaaccgtcccatccacgtcatcttgcctttgatcatcaaccttaggaacagactgcacagagagtgtggttatcctgcgcaccttagagtcagagttggagctggaggcggtgttggctgcccacaagctgctgcggctgccctcacaatgggagctgccttcatagtgactgggactgtcaatcaagttgctaaacagtccgggacatgtgacaacgtgagaaaacaactcagtcaagccacctacagtgacatttgcatggctccagcagctgatatgtttgaggaaggtgtgaaactccaagttctcaagaagggaacaatgttcccatcaagagctaacaaattgtacgaactcttttgcaagtacgactctttcgattcaatgcctcctgctgaacttgaaaggatcgagaagaggatcttcaagagggcacttcaagaggtctgggaagagaccaaggacttttacatcaatggtttgaagaatccagagaagatacagagagcggaacatgaccccaaactcaagatgtctttgtgtttcagatggtatcttggtcttgcatcacgttgggccaacatgggtgctcctgatcgtgtcatggactatcaagtctggtgtggtccagccattggagccttcaatgacttcatcaaaggaacatatcttgatcctgctgtctctaatgagtacccatgtgttgtccagatcaaccttcagattttgcgtggtgcatgttacctgaggcgtcttaatgctctgagaaatgatccgaggattgatcttgagactgaagatgctgcctttgtctatgagccaacgaatgcgctttgagtagttagcttaatcacttaggtcacccagtccaagcccggcctagcacgatgatcatgagtgttgctattgatgtatgttaatactatacacagtcatcgtgtgtgttttataaaactgtaagcttaggatgtttgaggctaatgtaattagcactacaccgtaataaatgagaggtttactttatgttttaataatgttcttacccttgctgctctctaaactgtaatggcgtacggttagctaaactaaagtaaaaatcgattcgcttgagtaaaattagtgaccgggaaagatcatcgactactactgctcagagatgtaatcggtaattaagacttcaagctcaataattaattaggagtaaatctggcttcgaatttttaaattgtcaacttccaaagaaggattggcaagactcaatctcaattgcccaacaaacatatggctctttacaaatttggaatctctttttgatggcaagaacgtcgtaattcctctgtcgatctcatgtaattaccaaactcatctacttattactttctttatatgcacttactgatgcggccgcttaattaatcacgagtggatgactgtcacgactgactcatgactgactactagtgctagcctcgaggtcgacacaactttgtataataaagttgtctagacctaggagctgtgctgggtaactcacatgagtcactggtcacatcagcggccgcagcttatagtaaagatttttttgttaataaaatgaaagttaatatttatggatttatttgaacatatttacaagtttttgttaataaatttatttacagaagtgttaaatttgaaaatgtgttaaatgagagttaatatttatggatataatattactttatttaaaaataaaatgaatttatattaaaatatgatttggtaaaagatattataaagaggaacttggatgagaaagacgacgatgggcaaaagttgcatggcacaccgcttttgttcagtaacatctgcactgtggcgcctttttcacactcaccatgcatgctgccacgtcagctttcacactatgacaccactggccatacacgttgccacctcagctttctcctcttctcactatgacacgactggccatgcatgcatgcatgctgccacctcagctcccgcctcttcacccgtgtctttctctcatgtcgcagtgctgcgtgccaacctcttctctctataaatagagagaagagaatgatggttaaactcaaaccaaaacaagaaaacatacacaaatagcaaaacggatccacaaccaaaaatgcttcagcacacttggcttccgaagcctcccaatctgaccctcttgtcagatgaggttcatctctggaggattcctcttgaccagcctgagtcacaacttcaagaccttgctgccaccctgagcagtgatgaattggcgagggcaaacagattctactttccagaacacagaaggcgtttcactgctgggagaggcatcctcagatccatcttgggtggatacttgggagtggaaccgggtcaagtcaagtttgattatgagtcccgtgggaaaccgatccttggtgacagatttgctgagagtggactcctgttcaacttgtctcacagccagaaccttgccttgtgtgctgtcaactacacgcgtcaaataggcattgatcttgaatatctgcgtccaacatctgacttggagtctcttgcaaagaggttctttctcccaagagaatatgaactcttgaggtcactccctgatgagcagaaacagaagattttctttcgttactggacttgcaaagaggcttatctcaaagcaacgggagatggaatagccaaacttgaagagatcgagatagcactcaccccaacagaacctgccaagctccaaacagctcctgcgtggtctctgttggagcttgtgccagatgacaattgtgttgcagctgtggctgttgcgggttttggttggcagcccaagttctggcattactgagtagttagcttaatcacttaggtcacccagtccaagcccggcctagcacgatgatcatgagtgttgctattgatgtatgttaatactatacacagtcatcgtgtgtgttttataaaactgtaagcttaggatgtttgaggctaatgtaattagcactacaccgtaataaatgagaggtttactttatgttttaataatgttcttacccttgctgctctctaaactgtaatggcgtacggttagctaaactaaagtaaaaatcgattcgcttgagtaaaattagtgaccgggaaagatcatcgactactactgctcagagatgtaatcggtaattaagacttcaagctcaataattaattaggagtaaatctggcttcgaatttttaaattgtcaacttccaaagaaggattggcaagactcaatctcaattgcccaacaaacatatggctctttacaaatttggaatctctttttgatggcaagaacgtcgtaattcctctgtcgatctcatgtaattaccaaactcatctacttattactttctttatatgcacttactgatgcggccgcttaattaactactgtcactgaggccgtagacgagtacggactgatctaactagtgctagcctcgaggtcgacacccagctttcttgtacaaagtggttgcggccgcttaattaaatttaaattcaattaatgcaatcttgattttcaacaacgaaggtaatggcgtaaaagaaaaaatgtatgttattgtattgatctttcatgatgttgaagcgtgccataatatgatgatgtataattaaaatattaactgtcgcattttattgaaatggcactgttatttcaaccatatctttgattctgttacatgacacgactgcaagaagtaaataatagacgccgttgttaaagaattgctatcatatgtgcctaactagagggaatttgagcgtcagacctaatcaaatattacaaaatatctcactctgtcgccagcaatggtgtaatcagcgcagacaaatggcgtaaagatcgcggaaaaacctccccgagtggcatgatagctgcctctgtattgctgatttagtcagccttatttgacttaagggtgccctcgttagtgacaaattgctttcaaggagacagccatgccccacactttgttgaaaaacaaattgcctttggggagacggtaaagccagttgctcttcaataaggaatgtcgaggaggcaatgtaaccgcctctggtagtacacttctctaatccaaaaatcaatttgtattcaagataccgcaaaaaacttatggtttaaaccctgcaggactagtccagaaggtaattatccaagatgtagcatcaagaatccaatgtttacgggaaaaactatggaagtattatgtaagctcagcaagaagcagatcaatatgcggcacatatgcaacctatgttcaaaaatgaagaatgtacagatacaagatcctatactgccagaatacgaagaagaatacgtagaaattgaaaaagaagaaccaggcgaagaaaagaatcttgaagacgtaagcactgacgacaacaatgaaaagaagaagataaggtcggtgattgtgaaagagacatagaggacacatgtaaggtggaaaatgtaagggcggaaagtaaccttatcacaaaggaatcttatcccccactacttatccttttatatttttccgtgtcatttttgcccttgagttttcctatataaggaaccaagttcggcatttgtgaaaacaagaaaaaatttggtgtaagctattttctttgaagtactgaggatacaacttcagagaaatttgtaagtttgtaggtaccagatctggatcccaaaccatgtctccggagaggagaccagttgagattaggccagctacagcagctgatatggccgcggtttgtgatatcgttaaccattacattgagacgtctacagtgaactttaggacagagccacaaacaccacaagagtggattgatgatctagagaggttgcaagatagatacccttggttggttgctgaggttgagggtgttgtggctggtattgcttacgctgggccctggaaggctaggaacgcttacgattggacagttgagagtactgtttacgtgtcacataggcatcaaaggttgggcctaggatctacattgtacacacatttgcttaagtctatggaggcgcaaggttttaagtctgtggttgctgttataggccttccaaacgatccatctgttaggttgcatgaggctttgggatacacagcccggggtacattgcgcgcagctggatacaagcatggtggatggcatgatgttggtttttggcaaagggattttgagttgccagctcctccaaggccagttaggccagttacccaaatctgagtagttagcttaatcacctagagctcgatcggcggcaatagcttcttagcgccatcccgggttgatcctatctgtgttgaaatagttgcggtgggcaaggctctctttcagaaagacaggcggccaaaggaacccaaggtgaggtgggctatggctctcagttccttgtggaagcgcttggtctaaggtgcagaggtgttagcgggatgaagcaaaagtgtccgattgtaacaagatatgttgatcctacgtaaggatattaaagtatgtattcatcactaatataatcagtgtattccaatatgtactacgatttccaatgtctttattgtcgccgtatgtaatcggcgtcacaaaataatccccggtgactttcttttaatccaggatgaaataatatgttattataatttttgcgatttggtccgttataggaattgaagtgtgcttgaggtcggtcgccaccactcccatttcataattttacatgtatttgaaaaataaaaatttatggtattcaatttaaacacgtatacttgtaaagaatgatatcttgaaagaaatatagtttaaatatttattgataaaataacaagtcaggtattatagtccaagcaaaaacataaatttattgatgcaagtttaaattcagaaatatttcaataactgattatatcagctggtacattgccgtagatgaaagactgagtgcgatattatggtgtaatacataggaattcgtttaaacgatctgcgtctaattttcggtccaacttgcacaggaaagacgtcgaccgcggtagctcttgcccagcagactgggcttccagtcctttcgctcgatcgggtccaatgttgtcctcagctgtgaaccggaagcggacgaccaacagtggaagaactgaaaggaacgagccgtctataccttgatgatcggcctctggtgaagggtatcatcgcagccaagcaagctcatgaaaggctgatgggggaggtgtataattatgaggcccacggcgggcttattctttagggaggatctatctcgttgctcaagtgcatggcgcaaagcagttattggagtgcggattttcgttggcatattattcgccacgagttagcagacgaagagaccttcatgaacgtggccaaggccagagttaagcagatgttacgccctgctgcaggcctttctattatccaatagttggttgatctttggaaagagcctcggctgaggcccatactgaaagagatcgatggatatcgatatgccatgttgtttgctagccagaaccagatcacatccgatatgctattgcagcttgacgcagatatggaggataagttgattcatgggatcgctcaggagtagctcatccatgcacgccgacaagaacagaaattccgtcgagttaacgcagccgcttacgacggattcgaaggtcatccattcggaatgtattagtttgcaccagctccgcgtcacacctgtcttcatttgaataagatgttagcaattgtttttagctttgtcttgttgtggcagggcggcaagtgcttcagacatcattctgttttcaaattttatgctggagaacagcttcttaattcctttggaaataatagactgcgtcttaaaattcagatgtctggatatagatatgattgtaaaataacctatttaagtgtcatttagaacataagttttatgaatgttcttccattttcgtcatcgaacgaataagagtaaatacaccttttttaacattacaaataagttcttatacgttgtttatacaccgggaatcatttccattattttcgcgcaaaagtcacggatattcgtgaaagcgacataaactgcgaaatttgcggggagtgtcttgagtttgcctcgaggctagcgcatgcacatagacacacacatcatctcattgatgcttggtaataattgtcattagattgtttttatgcatagatgcactcgaaatcagccaattttagacaagtatcaaacggatgtgacttcagtacattaaaaacgtccgcaatgtgttattaagttgtctaagcgtcaatttgatttacaattgaatatatcctgccccagccagccaacagctcgatttacaattgaatatatcctgccggccggcccacgcgtgtcgaggaattctgatctggcccccatttggacgtgaatgtagacacgtcgaaataaagatttccgaattagaataatttgtttattgctttcgcctataaatacgacggatcgtaatttgtcgttttatcaaaatgtactttcattttataataacgctgcggacatctacatttttgaattgaaaaaaaattggtaattactctttctttttctccatattgaccatcatactcattgctgatccatgtagatttcccggacatgaagccatttacaattgaatatatcctgccgccgctgccgctttgcacccggtggagcttgcatgttggtttctacgcagaactgagccggttaggcagataatttccattgagaactgagccatgtgcaccttccccccaacacggtgagcgacggggcaacggagtgatccacatgggacttttaaacatcatccgtcggatggcgttgcgagagaagcagtcgatccgtgagatcagccgacgcaccgggcaggcgcgcaacacgatcgcaaagtatttgaacgcaggtacaatcgagccgacgttcacgcggaacgaccaagcaagcttggctgccatttttggggtgaggccgttcgcggccgaggggcgcagcccctggggggatgggaggcccgcgttagcgggccgggagggttcgagaagggggggcaccccccttcggcgtgcgcggtcacgcgcacagggcgcagccctggttaaaaacaaggtttataaatattggtttaaaagcaggttaaaagacaggttagcggtggccgaaaaacgggcggaaacccttgcaaatgctggattttctgcctgtggacagcccctcaaatgtcaataggtgcgcccctcatctgtcagcactctgcccctcaagtgtcaaggatcgcgcccctcatctgtcagtagtcgcgcccctcaagtgtcaataccgcagggcacttatccccaggcttgtccacatcatctgtgggaaactcgcgtaaaatcaggcgttttcgccgatttgcgaggctggccagctccacgtcgccggccgaaatcgagcctgcccctcatctgtcaacgccgcgccgggtgagtcggcccctcaagtgtcaacgtccgcccctcatctgtcagtgagggccaagttttccgcgaggtatccacaacgccggcggccgcggtgtctcgcacacggcttcgacggcgtttctggcgcgtttgcagggccatagacggccgccagcccagcggcgagggcaaccagcccggtgagcgtcggaaagggtcgacggatcttttccgctgcataaccctgcttcggggtcattatagcgattttttcggtatatccatcctttttcgcacgatatacaggattttgccaaagggttcgtgtagactttccttggtgtatccaacggcgtcagccgggcaggataggtgaagtaggcccacccgcgagcgggtgttccttcttcactgtcccttattcgcacctggcggtgctcaacgggaatcctgctctgcgaggctggccggctaccgccggcgtaacagatgagggcaagcggatggctgatgaaaccaagccaaccaggaagggcagcccacctatcaaggtgtactgccttccagacgaacgaagagcgattgaggaaaaggcggcggcggccggcatgagcctgtcggcctacctgctggccgtcggccagggctacaaaatcacgggcgtcgtggactatgagcacgtccgcgagctggcccgcatcaatggcgacctgggccgcctgggcggcctgctgaaactctggctcaccgacgacccgcgcacggcgcggttcggtgatgccacgatcctcgccctgctggcgaagatcgaagagaagcaggacgagcttggcaaggtcatgatgggcgtggtccgcccgagggcagagccatgacttttttagccgctaaaacggccggggggtgcgcgtgattgccaagcacgtccccatgcgctccatcaagaagagcgacttcgcggagctggtattcgtgcagggcaagattcggaataccaagtacgagaaggacggccagacggtctacgggaccgacttcattgccgataaggtggattatctggacaccaaggcaccaggcgggtcaaatcaggaataagggcacattgccccggcgtgagtcggggcaatcccgcaaggagggtgaatgaatcggacgtttgaccggaaggcatacaggcaagaactgatcgacgcggggttttccgccgaggatgccgaaaccatcgcaagccgcaccgtcatgcgtgcgccccgcgaaaccttccagtccgtcggctcgatggtccagcaagctacggccaagatcgagcgcgacagcgtgcaactggctccccctgccctgcccgcgccatcggccgccgtggagcgttcgcgtcgtctcgaacaggaggcggcaggtttggcgaagtcgatgaccatcgacacgcgaggaactatgacgaccaagaagcgaaaaaccgccggcgaggacctggcaaaacaggtcagcgaggccaagcaggccgcgttgctgaaacacacgaagcagcagatcaaggaaatgcagctttccttgttcgatattgcgccgtggccggacacgatgcgagcgatgccaaacgacacggcccgctctgccctgttcaccacgcgcaacaagaaaatcccgcgcgaggcgctgcaaaacaaggtcattttccacgtcaacaaggacgtgaagatcacctacaccggcgtcgagctgcgggccgacgatgacgaactggtgtggcagcaggtgttggagtacgcgaagcgcacccctatcggcgagccgatcaccttcacgttctacgagctttgccaggacctgggctggtcgatcaatggccggtattacacgaaggccgaggaatgcctgtcgcgcctacaggcgacggcgatgggcttcacgtccgaccgcgttgggcacctggaatcggtgtcgctgctgcaccgcttccgcgtcctggaccgtggcaagaaaacgtcccgttgccaggtcctgatcgacgaggaaatcgtcgtgctgtttgctggcgaccactacacgaaattcatatgggagaagtaccgcaagctgtcgccgacggcccgacggatgttcgactatttcagctcgcaccgggagccgtacccgctcaagctggaaaccttccgcctcatgtgcggatcggattccacccgcgtgaagaagtggcgcgagcaggtcggcgaagcctgcgaagagttgcgaggcagcggcctggtggaacacgcctgggtcaatgatgacctggtgcattgcaaacgctagggccttgtggggtcagttccggctgggggttcagcagccagcgctttactggcatttcaggaacaagcgggcactgctcgacgcacttgcttcgctcagtatcgctcgggacgcacggcgcgctctacgaactgccgataaacagaggattaaaattgacaattgtgattaaggctcagattcgacggcttggagcggccgacgtgcaggatttccgcgagatccgattgtcggccctgaagaaagctccagagatgttcgggtccgtttacgagcacgaggagaaaaagcccatggaggcgttcgctgaacggttgcgagatgccgtggcattcggcgcctacatcgacggcgagatcattgggctgtcggtcttcaaacaggaggacggccccaaggacgctcacaaggcgcatctgtccggcgttttcgtggagcccgaacagcgaggccgaggggtcgccggtatgctgctgcgggcgttgccggcgggtttattgctcgtgatgatcgtccgacagattccaacgggaatctggtggatgcgcatcttcatcctcggcgcacttaatatttcgctattctggagcttgttgtttatttcggtctaccgcctgccgggcggggtcgcggcgacggtaggcgctgtgcagccgctgatggtcgtgttcatctctgccgctctgctaggtagcccgatacgattgatggcggtcctgggggctatttgcggaactgcgggcgtggcgctgttggtgttgacaccaaacgcagcgctagatcctgtcggcgtcgcagcgggcctggcgggggcggtttccatggcgttcggaaccgtgctgacccgcaagtggcaacctcccgtgcctctgctcacctttaccgcctggcaactggcggccggaggacttctgctcgttccagtagctttagtgtttgatccgccaatcccgatgcctacaggaaccaatgttctcggcctggcgtggctcggcctgatcggagcgggtttaacctacttcctttggttccgggggatctcgcgactcgaacctacagttgtttccttactgggctttctcagcccccgagcgcttagtgggaatttgtaccccttatcgaaccgggagcacaggatgacgcctaacaattcattcaagccgacaccgcttcgcggcgcggcttaattcaggagttaaacatcatgagggaagcggtgatcgccgaagtatcgactcaactatcagaggtagttggcgtcatcgagcgccatctcgaaccgacgttgctggccgtacatttgtacggctccgcagtggatggcggcctgaagccacacagtgatattgatttgctggttacggtgaccgtaaggcttgatgaaacaacgcggcgagctttgatcaacgaccttttggaaacttcggcttcccctggagagagcgagattctccgcgctgtagaagtcaccattgttgtgcacgacgacatcattccgtggcgttatccagctaagcgcgaactgcaatttggagaatggcagcgcaatgacattcttgcaggtatcttcgagccagccacgatcgacattgatctggctatcttgctgacaaaagcaagagaacatagcgttgccttggtaggtccagcggcggaggaactctttgatccggttcctgaacaggatctatttgaggcgctaaatgaaaccttaacgctatggaactcgccgcccgactgggctggcgatgagcgaaatgtagtgcttacgttgtcccgcatttggtacagcgcagtaaccggcaaaatcgcgccgaaggatgtcgctgccgactgggcaatggagcgcctgccggcccagtatcagcccgtcatacttgaagctaggcaggcttatcttggacaagaagatcgcttggcctcgcgcgcagatcagttggaagaatttgttcactacgtgaaaggcgagatcaccaaggtagtcggcaaataatgtctaacaattcgttcaagccgacgccgcttcgcggcgcggcttaactcaagcgttagagagctggggaagactatgcgcgatctgttgaaggtggttctaagcctcgtcttgcgatggcatttcgatccattcccattccgcgctcaagatggcttcccctcggcagttcatcagggctaaatcaatctagccgacttgtccggtgaaatgggctgcactccaacagaaacaatcaaacaaacatacacagcgacttattcacacgagctcaaattacaacggtatatatcctgccagtcagcatcatcacaccaaaagttaggcccgaatagtttgaaattagaaagctcgcaattgaggtctacaggccaaattcgctcttagccgtacaatattactcaccggatcctaaccggtttaattaaggcgcgccatgcccgggcaagcggccgcacaagttt

SEQ ID NO: 56 - DNA, 34850 bp, Artificial sequence
  plasmid pDAB109509
gtacaaaaaagcaggcttctagacctaggtggagtcatcacgcagactatctcagcatgtgcgtagcacgcggccgcagcttatagtaaagatttttttgttaataaaatgaaagttaatatttatggatttatttgaacatatttacaagtttttgttaataaatttatttacagaagtgttaaatttgaaaatgtgttaaatgagagttaatatttatggatataatattactttatttaaaaataaaatgaatttatattaaaatatgatttggtaaaagatattataaagaggaacttggatgagaaagacgacgatgggcaaaagttgcatggcacaccgcttttgttcagtaacatctgcactgtggcgcctttttcacactcaccatgcatgctgccacgtcagctttcacactatgacaccactggccatacacgttgccacctcagctttctcctcttctcactatgacacgactggccatgcatgcatgcatgctgccacctcagctcccgcctcttcacccgtgtctttctctcatgtcgcagtgctgcgtgccaacctcttctctctataaatagagagaagagaatgatggttaaactcaaaccaaaacaagaaaacatacacaaatagcaaaacggatccacaaccaaaaatggcagcgaggctgcaagagcagaaaggaggtgagatggacacgaggattgcgatcataggcatgagcgccatacttccttgtggaaccacggtgagagagtcatgggagaccataagggctggcattgattgcctgtctgatcttcctgaggatcgtgttgatgtgactgcgtactttgacccagtcaagaccacaaaggacaaaatctactgcaagagaggaggtttcattcctgagtatgactttgatgcgcgtgagtttggtctcaacatgttccagatggaagattctgatgcgaatcagaccatctcacttctcaaggtcaaagaagcacttcaagatgctgggattgatgcacttggaaaggagaagaaaaacataggatgcgtgcttggcattggaggtggacagaagagttcacatgagttctacagcagactcaactatgtggttgtggagaaagtcttgagaaagatggggatgccagaggaagatgtcaaagtggctgtggagaagtacaaagcgaacttcccagaatggagacttgactctttccctggattccttgggaatgtcactgctggcagatgcaccaacacattcaacttggatggcatgaactgcgttgtggatgctgcatgtgcaagctccttgatagcagtcaaggttgcgattgatgaactgctctatggtgactgcgacatgatggtcactggtgcaacctgcacagacaactccattgggatgtacatggctttctcaaagacacctgtgttcagcacggacccaagtgtgagagcgtatgatgagaaaacgaaagggatgctcattggtgagggatcagccatgttggtgctcaaacgttatgcagatgcagtgagggatggtgatgagattcatgctgtgattcgtggttgtgcaagctcaagtgatggcaaagcagctggcatctacactcccacaatcagtggtcaagaggaagccttgagacgtgcatacaatcgtgcctgcgttgaccctgccactgtcactttggttgagggtcatgggactggcactccagttggagataggattgagttgactgcgttgaggaacttgtttgacaaagcgtatggtgaagggaacacagagaaagttgcagttggaagtatcaagtccagtattggtcatttgaaggctgttgctggtcttgctggaatgatcaaggtcatcatggctctcaaacacaagactttgcctggaacgatcaatgtggacaatccacccaatctctatgacaacactcccatcaatgagtcatccctctacatcaacacgatgaacagaccctggttccctccacctggtgttccgagacgtgctggaatatccagctttggctttggaggtgccaactaccatgcagtgttggaagaggctgaaccagagcacacgacagcgtacagactcaacaaacgtccacaaccggtgttgatgatggctgcaactcctgctgcgttgcagagcctttgtgaagctcagctgaaagagtttgaagctgcgatcaaggagaatgagacagtcaagaatactgcctacatcaagtgtgtcaagtttggagaacagttcaagttccctgggagcatacctgcgaccaatgcgagactgggattcttggtcaaagatgcggaggatgcgtgctccacgcttcgtgctatatgtgctcagtttgccaaagatgtgaccaaagaagcgtggaggcttccgagagaaggagtttctttccgtgccaaaggcattgccaccaatggtgctgttgctgcactcttctctggacaaggtgctcagtacacacacatgttcagtgaagttgcgatgaactggcctcagttcagacagtccattgctgcaatggacgctgcacagtccaaggttgctggaagtgacaaagactttgaaagagtctctcaagtcctgtacccaaggaaaccgtacgaacgtgagccagaacaagatcacaagaaaatctcactcacagcatacagccagccgtcaaccctggcatgtgctcttggtgcctttgagattttcaaggaagctggattcactccagactttgcagctggacacagcttgggtgagtttgctgcgctctatgcagctggttgtgttgacagagatgagttgtttgaacttgtttgcagaagggcaaggatcatgggaggcaaagatgcacctgccacacccaaaggttgcatggcagctgtcataggacccaacgcagagaacatcaaggttcaagctgccaacgtctggcttggaaactcaaactctccgtctcagactgtcattactgggtctgttgaagggattcaagctgaaagtgccagattgcagaaggaagggttcagagttgtgcctcttgcttgtgagtctgccttccattctccacagatggaaaatgccagctcagctttcaaagatgtcatatccaaggtttccttccgtacacccaaagcagaaacaaagctcttcagcaatgtttctggagagacctatccgacggatgccagagagatgctcactcaacacatgacctcatctgtgaagttcctgacccaagtgaggaacatgcaccaagctggtgcgagaatctttgttgagtttggaccgaaacaagttctcagcaaacttgtttctgaaaccctcaaagatgacccgtctgttgtcacagtgtctgtgaacccagcttctggcacggactctgacatacagttgagggatgctgcagttcagctggttgtggctggtgtcaatcttcaagggtttgacaagtgggatgctcctgatgccacgaggatgcaagccatcaagaaaaagagaaccacactcagactttcagctgccacctatgtcagtgacaagaccaagaaagtgagggatgctgccatgaacgacggaagatgtgtcacatacctcaagggtgctgcaccactcatcaaggctcctgaacctgtggttgacgaagctgccaagagggaggctgaaaggcttcagaaggagcttcaagacgctcagaggcagcttgacgacgccaaacgtgcagctgcagaagccaactccaaacttgctgctgccaaggaggaagccaagactgctgcagcttcagccaagcctgcagttgacactgctgttgtggagaaacatcgtgccatcctcaagtccatgctggctgagctggatggttatggaagtgttgatgcttcttcccttcagcaacagcaacagcaacagactgctccggcgcctgttaaagccgctgcccctgccgctcccgttgcaagtgctcctgctcccgccgtgtccaacgagttgcttgagaaagctgagacagttgtgatggaggttctcgctgccaagactggatacgaaacagacatgattgaggcggacatggagcttgagactgagttgggaattgacagcatcaagagggttgaaattctttctgaagtccaagctatgcttaacgttgaggcgaaagatgttgatgctctctctaggacgagaacagtgggtgaagttgtcaacgctatgaaggcagaaatcgctggttcttccgctccggcgccggcagctgccgcacctgcaccggctaaagcggctccagctgcagctgcaccagctgtttctaatgagctgctcgaaaaggcagaaactgttgtgatggaagtccttgctgccaaaactggctacgaaactgacatgatagaatcagacatggagcttgagacggagcttggaattgattccatcaagcgtgtggaaatcctcagtgaagtccaagccatgctcaatgtggaagctaaggatgtggatgctctctcaaggaccagaactgtcggtgaggttgtcaatgccatgaaggctgagatagctggaggctccgctcctgcgccggccgctgccgctcctggtcccgctgccgcggctccagctccagctgcagccgctccggccgtctcaaacgaactccttgaaaaagctgagaccgtcgtgatggaggtcttggcagctaaaaccggctatgagactgacatgattgagtctgacatggaattggagacagaacttgggatagacagcatcaaacgtgttgaaatcctcagtgaggtccaagctatgctgaacgtggaagcgaaggatgttgatgctctgtccagaacgaggaccgttggtgaggttgtggatgccatgaaggctgaaattgctggagggtctgcgcccgcgccagctgcagccgctcctgcacccgcagccgcggcacctgctccagctgcacctgcacctgccgtttcttcagaactcttggagaaggctgagacggttgtgatggaggttttggctgcaaagactggctatgagaccgacatgattgaatctgatatggaattggagacagagcttgggatcgattccatcaaaagagtggagatcctgagtgaagtccaagccatgctcaatgttgaagctaaggatgttgatgcactttcaagaacaaggacagtgggtgaggttgtggatgccatgaaggcggagattgctggagggagcgcgcctgcgccagctgccgcggcacctgcaccggcagccgcagctccagctccagctgcaccagcaccggccgcgcccgcgccagctgtttcatccgaactcctggaaaaggccgagacggttgtgatggaggtgctcgcagctaagactggttacgagaccgacatgattgaaagtgacatggagcttgaaaccgagttgggaatagatagcatcaaacgtgttgaaatcttgtctgaggtccaagctatgttgaacgtggaggcaaaagatgtcgatgcgctttcaagaaccagaacagtcggtgaggtcgtggacgccatgaaggctgaaattgccggaagctctgctagtgcgccagctgcagccgcacctgcacctgctgccgcggcacctgctccagctgcagccgctcctgccgtcagcaatgagttgctggagaaagccgaaacagttgtgatggaagtccttgctgcaaaaactggttacgaaacggacatgattgagtcagacatggaattggagaccgaacttggaatagattccatcaagagagtggagatcctctctgaggtgcaagccatgctcaacgttgaggctaaagatgttgatgcactcagtaggacaagaactgtgggggaagttgtcgatgcgatgaaggctgagattgctggaggctctgctcctgcgccggcagctgccgcacctgcacccgcagccgcggcaccagctgtcagcaacgaattgcttgagaaggctgaaacagttgtcatggaagtgctggctgcaaaaaccggctatgagactgacatgattgagtctgacatggaacttgagacggaattgggcattgacagcatcaagcgtgttgagatcctcagtgaagtccaagcaatgctcaatgtggaggctaaggatgtggatgccctctcaaggaccagaacagttggtgaggtcgttgatgcgatgaaggcggagatcgctggaagttccgcgcctgcgccagctgcagccgctcctgcacccgcagccgcggcaccggctccagctgcagccgcaccggccgtctcctcagaactcctggaaaaggctgagacagttgtgatggaagtccttgctgcgaaaactggctatgagaccgacatgattgaatctgacatggaactggagaccgagcttggaattgactccatcaaacgtgttgaaatcctctctgaggttcaagcgatgttgaatgtggaggccaaagatgttgatgctctttccagaacaaggacggtgggagaggtggttgatgccatgaaggctgagatagctgggggttctgctcctgcgccagctgcagccgctcctgctcccgctgccgcggcaccagctgtcagcaacgaactccttgaaaaagctgaaactgttgtgatggaggttttggctgcaaagactggatacgagactgacatgatagagtcagacatggagttggaaacagagcttgggattgatagcatcaagcgtgtggaaatcctttctgaggttcaagccatgctgaacgttgaggccaaagatgtcgatgctttgtcaaggaccagaacggttggagaagtggtcgatgccatgaaggctgagatagctggtggatcagcccctgctccggctgcagccgctcctgcaagtgccggtgctgcaccagctgtgaagattgattcagttcatggtgctgactgtgacgatttgtcactgatgcacgcaaaggtggttgacatcagaaggccagatgaactgattctggaaagaccggagaaccgtccagttcttgtcgttgacgatggctcagagttgacacttgctcttgtgagggtgttgggagcctgtgcagttgtcttgacctttgagggattgcagttggctcagagagctggtgcagctgccattcgtcatgttctggctaaggacctttcagcagaatcagctgagaaggccatcaaagaggctgagcaaagatttggagcgttgggaggcttcataagccagcaagcagaaaggtttgaaccagctgagatactgggtttcacactcatgtgtgcgaagtttgccaaagcctctctctgcactgctgtggctggaggtcgtcctgccttcatcggtgtggctaggcttgacggcagacttggattcacctctcaaggcacttctgacgcactcaagagagcacagcgtggagcgatctttggactctgcaagacaatagggttggagtggtcagaatctgatgtgttcagccgtggtgtggacattgctcaagggatgcacccagaagatgctgcagttgccatagttagggagatggcgtgtgctgacatcagaatcagagaggttgggattggagcaaaccagcaaagatgcacaatcagagctgccaagttggagactgggaaccctcagagacagatagcgaaagacgatgtgcttctggtttctggaggtgctcgtgggatcacacctctttgcatccgtgagatcacgcgtcagattgctggaggcaagtacattctgttgggtcgtagcaaagtttctgcgtctgaaccagcatggtgtgctggcatcactgatgagaaggctgtgcagaaagctgccacccaagagttgaagagggccttcagtgctggtgaaggacccaaacccactccaagggctgtcacgaaacttgtgggatctgttcttggtgctcgtgaagtgagaagctccattgctgccattgaagctctgggtggcaaagcgatctacagctcttgtgatgtgaactctgctgcagatgttgccaaagcagttagggatgcagagtcccagcttggtgccagagttagtggaatcgttcacgcttctggtgtgctccgtgatcgtctcatagagaagaaactccctgacgagtttgatgctgtctttgggaccaaagtcactgggttggagaatcttctggctgcagttgatcgtgccaacctcaaacacatggttctcttcagctcccttgctggtttccacggcaatgttggtcagtctgactatgcgatggcaaacgaagctctcaacaagatgggtttggaacttgcgaaggatgtcagtgtcaagtccatctgctttggtccctgggatggtgggatggtgacacctcaactcaagaaacagtttcaagaaatgggagttcagatcattcctcgtgaaggaggtgctgatacagttgcgaggattgtgttgggatcaagtcctgctgagatccttgttggaaactggaggacaccatccaagaaagttggaagtgacacgatcaccctgcatagaaagatcagtgccaagtccaatcccttcttggaggatcatgtcatacaaggcagaagggtgttgccaatgacccttgctattgggagccttgctgagacctgccttggactcttccctggctactctctctgggccatagatgacgcacagctcttcaaaggtgtcactgttgatggagacgtcaactgtgaagtgaccctcacaccgtccactgctccgagtgggagggtgaatgtccaagcgacgctcaagacgttctcaagtggaaaacttgttccagcctacagagctgtcatagtgttgtccaaccaaggtgctccacctgccaatgcaaccatgcagcctccgagccttgatgcagatcctgctttgcaagggtcagtctatgatggcaagactctctttcatggtcctgcgttcagaggcattgatgacgttctcagctgcaccaagagccagcttgttgccaagtgttctgctgttcctggatcagatgcagccagaggagagtttgcaactgacactgatgcacatgatccctttgtcaatgatcttgcctttcaagcaatgttggtctgggtgaggagaacgctgggacaagctgcactcccgaactccattcagaggatagtccaacacagaccggtcccacaagacaaacccttctacatcaccctcagatccaatcagagtggtggacatagccagcacaaacatgcacttcagttccacaacgaacaaggtgatctcttcattgatgttcaagcctctgtcattgcgacagactcacttgcgttctgagtagttagcttaatcacttaggtcacccagtccaagcccggcctagcacgatgatcatgagtgttgctattgatgtatgttaatactatacacagtcatcgtgtgtgttttataaaactgtaagcttaggatgtttgaggctaatgtaattagcactacaccgtaataaatgagaggtttactttatgttttaataatgttcttacccttgctgctctctaaactgtaatggcgtacggttagctaaactaaagtaaaaatcgattcgcttgagtaaaattagtgaccgggaaagatcatcgactactactgctcagagatgtaatcggtaattaagacttcaagctcaataattaattaggagtaaatctggcttcgaatttttaaattgtcaacttccaaagaaggattggcaagactcaatctcaattgcccaacaaacatatggctctttacaaatttggaatctctttttgatggcaagaacgtcgtaattcctctgtcgatctcatgtaattaccaaactcatctacttattactttctttatatgcacttactgatgcggccgcttaattaagatgagtgatactcaggactcaggactcactctgctgatcactagtgctagcctcgaggtcgacacaactttgtatacaaaagttgtctagacctaggctcagcaactcatccagtcaagttcgagtcagtgagttgggcggccgcagcttatagtaaagatttttttgttaataaaatgaaagttaatatttatggatttatttgaacatatttacaagtttttgttaataaatttatttacagaagtgttaaatttgaaaatgtgttaaatgagagttaatatttatggatataatattactttatttaaaaataaaatgaatttatattaaaatatgatttggtaaaagatattataaagaggaacttggatgagaaagacgacgatgggcaaaagttgcatggcacaccgcttttgttcagtaacatctgcactgtggcgcctttttcacactcaccatgcatgctgccacgtcagctttcacactatgacaccactggccatacacgttgccacctcagctttctcctcttctcactatgacacgactggccatgcatgcatgcatgctgccacctcagctcccgcctcttcacccgtgtctttctctcatgtcgcagtgctgcgtgccaacctcttctctctataaatagagagaagagaatgatggttaaactcaaaccaaaacaagaaaacatacacaaatagcaaaacggatccacaaccaaaaatggctgcaaggaacgtgagtgcggctcatgagatgcatgacgagaagaggatagctgttgtgggcatggctgttcagtatgctggatgcaaaacgaaagacgagttctgggaagttctcatgaatggaaaagttgagagcaaagtgatcagcgacaaacgtcttggttcaaattaccgtgctgaacactacaaagctgaaaggagcaagtatgctgacaccttctgcaatgagacatatggaactcttgatgagaacgaaatagacaatgagcatgaactccttttgaaccttgccaaacaagccttggctgaaacatctgtcaaagattcaacaagatgtggcatagtttctggatgcctcagcttcccgatggacaacctccaaggtgaactcttgaatgtgtaccagaaccatgttgagaagaaacttggtgccagagttttcaaagatgcctctcactggtcagaaagagaacagtccaacaaaccagaggctggtgacagaagaatcttcatggaccctgcttcctttgttgctgaggaactcaatcttggcgctctccactactctgttgatgctgcctgtgccactgcgctctatgtgctcagactggcgcaagatcacttggtctctggtgcagctgatgtgatgctttgtggtgcaacatgcctgccggagccgtttttcatactctctgggttctcaaccttccaagccatgcctgttggaacgggtcagaatgtgtccatgccgctgcacaaagattctcaaggattgacccctggtgaaggaggttccatcatggtcctcaaacgtttggatgacgcaatcagagatggagatcacatctatggaacacttttgggagccaatgtcagcaacagtggcactggtctgccacttaaaccccttttgccgtcagagaaaaagtgcctcatggacacctacacacgtatcaatgtgcatccccacaagattcagtatgttgaatgccatgcaactgggactccacaaggtgatcgtgtggaaattgatgctgtgaaggcttgctttgaaggcaaagtcccacgttttggaaccacaaaagggaactttggacacacattggtggcagctgggtttgctggcatgtgcaaagtgcttctctccatgaagcacgggatcattccacccactccgggaatagatgacgaaacgaagatggaccctctggttgtctctggtgaggccattccctggccagaaacgaatggagaaccgaagcgtgctggtctctcagcgtttggatttggtgggaccaatgctcatgctgtctttgaggaacatgacccaagcaatgctgcatgcactggccatgactccatttctgctctctctgcacgttgtggtggtgagtcaaacatgagaatagcaatcactgggatggatgccacttttggtgctttgaaaggattggatgcttttgaaagggccatctacactggtgctcatggtgctataccactcccagaaaagagatggagattcctggggaaagacaaggacttccttgatctttgtggagtcaaagcaacaccgcatggctgttacattgaagatgttgaagttgatttccagaggctgaggactccaatgactcctgaagatatgctcttgcctcaacagcttctggctgtcaccacaattgatagggccatattggactctggcatgaagaaaggtggaaatgtggctgtctttgtggggttggggaccgatcttgaactctaccgtcaccgtgcaagggttgctctcaaggagagagtgaggcctgaagccagcaagaaactcaatgacatgatgcagtacatcaatgattgtgggacaagcacttcttacaccagctacataggcaacttggttgcaacaagggtcagttcacaatggggcttcacgggaccttccttcacaatcacagaaggcaacaattctgtgtacagatgtgctgaacttggcaaatacctcttggaaacgggagaggttgatggggttgtggttgcgggtgttgatctctgtgggagtgctgagaacctttacgtcaagtcaaggcgtttcaaggtgtctacatctgacaccccgagagccagctttgatgcagctgctgatggttactttgttggagagggctgtggtgcatttgtgctcaagcgtgagacaagctgcaccaaggatgacagaatctatgcttgcatggatgccatagttcctggaaatgttccatctgcatgtttgagagaggcattggatcaagccagagtcaagcctggagacatcgagatgttggagctttctgctgattcagcgaggcatttgaaggacccgtctgttctcccaaaggaactcactgctgaggaagagattggcggacttcagacgattcttcgtgacgatgacaagctcccaaggaatgttgcaactggaagtgtcaaggccactgttggtgacactggttatgcttctggtgctgccagtttgattaaggctgcgctttgcatctacaaccgttacctgcccagcaatggagatgactgggatgaacctgcacctgaagcaccctgggacagcacactctttgcgtgccagacctcaagagcttggttgaagaaccctggtgagagacgttatgcggctgtttccggagtcagtgaaaccagaagttgctacagtgtgctgctttctgaagcagagggacactacgagagagagaacagaatcagtttggatgaggaagcacccaagctcattgtgttgagagcagactcccatgaagagattcttggaagattggacaagataagggaaaggttcttgcagcccacgggtgctgcacccagagagtctgaattgaaggcgcaagcccgtaggatctttcttgaactccttggtgagacccttgcccaagatgcagcttcatctggaagtcagaagccccttgctctcagcttggtctccactccatccaagctccagagagaggtggaacttgcggcaaaaggcattccgagatgtctcaagatgagacgtgattggagttcccctgctggaagcagatatgcgcctgagcctttggccagtgacagagttgccttcatgtatggagaaggaaggagcccttactatggcatcacacaagacattcataggatttggcctgaacttcatgaggtcatcaatgagaaaacaaaccgtctctgggctgaaggtgacagatgggtcatgccaagggccagcttcaagagtgagcttgagtcacaacagcaagagtttgacagaaacatgattgaaatgttccgtcttggaatcctcacctcaattgccttcacaaacctggcgagagatgttctcaacatcacgcccaaagcagcctttggactcagtttgggagagatttccatgatctttgctttctccaagaaaaacggtttgataagcgatcagttgacaaaggatttgagagagtcagatgtctggaacaaagctctggctgttgagttcaatgcgctcagagaagcctggggcattccacagtctgtcccaaaagatgagttctggcaaggttacatagtgaggggaacgaaacaagacatagaagcagccatagcaccagactcaaagtatgtgaggttgaccatcatcaatgatgccaacactgctctcatcagtggaaagcctgatgcatgcaaagctgcgattgctcgtcttggtggcaacatccctgcgcttccagtcactcaaggcatgtgtgggcattgcccagaggtgggaccttacaccaaggacatcgcaaagatccacgccaaccttgagttccctgtggttgatggtcttgatctctggactaccataaaccagaagaggcttgtgccaagagccacgggtgccaaagatgaatgggctccttcatcctttggggagtatgctggacagctctatgagaaacaagccaacttccctcagatagttgaaaccatctacaagcagaactatgatgtgtttgttgaagttgggccaaacaatcacagaagcacagcagtgagaaccacgcttggaccacagagaaaccaccttgctggtgccatagacaagcagaacgaggatgcttggacgacaatagtcaagctcgtggcttcattgaaggctcaccttgttcctggagtgaccatcagtccgctctaccactccaagctcgttgcagaggctgaggcttgttatgctgcgctctgtaaaggtgagaaacccaagaaaaacaagtttgtgagaaagattcagttgaatggcagattcaacagcaaggcagaccccatctcctcagcagaccttgcatccttcccacctgcggaccctgcgattgaagctgccatctcttcaaggatcatgaagcctgtggctccgaaattctatgcgcgtctcaacattgatgagcaagatgagaccagagatccgatcttgaacaaggacaatgcgccttccagctccagctcttccagcagttcctcttccagcagttcatctccgtctcctgctccttcagctccagttcagaagaaagctgccccagctgcggagacaaaagctgttgccagtgctgatgcacttcgtagtgccctgcttgatcttgactccatgcttgcgctcagctctgcaagtgcttctggcaaccttgttgagactgcgccatctgatgccagtgtcattgtccctccgtgcaacattgctgatcttggcagcagagctttcatgaaaacttatggtgtttctgcgcctctgtacaccggtgcaatggccaagggaattgcctctgcggacttggtgatcgcagctggaaggcaaggaatccttgcgtcatttggtgctggaggccttccaatgcaagttgtgcgtgagtccattgaaaagattcaagctgccctgcccaatggaccatatgctgtcaacctcatccattctccttttgacagcaaccttgagaagggaaatgttgatctcttcttggaaaagggtgtcacttttgttgaggcttcagccttcatgacgttgacaccgcaagttgtcagatacagagcggctgggttgacgaggaatgcagatgggtcagtcaacataaggaacagaatcattgggaaagtctccagaactgagctggctgaaatgttcatgcgtcctgcacctgagcatcttttgcagaagctcattgcttctggggagatcaatcaagaacaagctgagttggccagacgtgttcctgtggctgatgacattgcggttgaagctgattctggtggacacactgacaaccgtccaatccatgtcattctgcctctgattatcaacctgagggataggcttcacagagagtgtggatacccagcaaacctgagggttcgtgttggtgctgggggtggcattgggtgtccccaagctgcgctggcaactttcaacatgggtgcctctttcattgtcactggaacagtgaaccaagttgccaaacaatctgggacgtgtgacaatgtgaggaaacagcttgcgaaagcaacttactcagatgtttgcatggcaccggcagctgacatgtttgaggaaggtgtgaaacttcaagttttgaagaaaggaacaatgttcccttcaagagccaacaaactctatgagttgttctgcaagtatgattcttttgagtccatgcctccagcagagcttgcgagggttgagaaaagaatcttcagtcgtgcattggaagaggtctgggatgagaccaagaacttctacatcaaccgtctccacaacccagagaagatacagagggctgagagggaccccaaactgaagatgtcactgtgtttcagatggtatctgtccctggcttcaaggtgggccaacactggagcttctgacagagtcatggactaccaagtttggtgtggtcctgccattggttcattcaatgatttcatcaaaggaacttaccttgatccggcagtggcaaatgagtacccgtgtgttgtgcagatcaacaaacagattcttagaggagcgtgcttcttgaggcgtcttgaaatactgagaaatgcaaggctttcagatggtgcagctgcacttgtggcgagcattgatgacacatatgtccctgctgagaagctgtgagtagttagcttaatcacttaggtcacccagtccaagcccggcctagcacgatgatcatgagtgttgctattgatgtatgttaatactatacacagtcatcgtgtgtgttttataaaactgtaagcttaggatgtttgaggctaatgtaattagcactacaccgtaataaatgagaggtttactttatgttttaataatgttcttacccttgctgctctctaaactgtaatggcgtacggttagctaaactaaagtaaaaatcgattcgcttgagtaaaattagtgaccgggaaagatcatcgactactactgctcagagatgtaatcggtaattaagacttcaagctcaataattaattaggagtaaatctggcttcgaatttttaaattgtcaacttccaaagaaggattggcaagactcaatctcaattgcccaacaaacatatggctctttacaaatttggaatctctttttgatggcaagaacgtcgtaattcctctgtcgatctcatgtaattaccaaactcatctacttattactttctttatatgcacttactgatgcggccgcttaattaatctgacctgaccactagacctgagtgagtacagatgtgctactagtgctagcctcgaggtcgaccaacttttctatacaaagttgtctagacctaggactaggcactgagtgactcactgacctgactgagtgactggcggccgcagcttatagtaaagatttttttgttaataaaatgaaagttaatatttatggatttatttgaacatatttacaagtttttgttaataaatttatttacagaagtgttaaatttgaaaatgtgttaaatgagagttaatatttatggatataatattactttatttaaaaataaaatgaatttatattaaaatatgatttggtaaaagatattataaagaggaacttggatgagaaagacgacgatgggcaaaagttgcatggcacaccgcttttgttcagtaacatctgcactgtggcgcctttttcacactcaccatgcatgctgccacgtcagctttcacactatgacaccactggccatacacgttgccacctcagctttctcctcttctcactatgacacgactggccatgcatgcatgcatgctgccacctcagctcccgcctcttcacccgtgtctttctctcatgtcgcagtgctgcgtgccaacctcttctctctataaatagagagaagagaatgatggttaaactcaaaccaaaacaagaaaacatacacaaatagcaaaacggatccacaaccaaaaatggcgcttcgtgtcaagaccaacaagaagccatgttgggagatgaccaaggaggaactgacctctggcaaaactgaggtgttcaactatgaggaactcctggagtttgcagagggtgacatagctaaggtttttggtccggagtttgctgtcatagacaagtaccccagaagggtgaggctgcctgctcgtgaatacctgcttgtgacaagggtcacactcatggatgccgaggtcaacaactacagagttggtgccagaatggtcactgagtatgatcttccagtgaatggcgaattgtctgagggaggtgattgtccctgggcagttctggttgagagtggacagtgcgatttgatgctgatatcatacatgggaattgatttccagaaccaaggtgacagagtttaccgtctgctcaacaccacgttgacattctatggggttgcccatgagggagagacccttgagtatgacatcagagtgaccggttttgccaaacgtttggatggtggcatctccatgttcttctttgagtatgactgctatgtcaatgggaggcttctcattgagatgagagatggctgtgctggcttcttcacaaatgaggagcttgatgcgggaaagggtgtggtgttcacaagaggggatttggctgccagagctaagattccaaagcaagatgtttctccctatgctgtcgctccctgccttcacaaaacaaaactcaacgaaaaggagatgcagaccttggttgacaaagattgggcttccgtttttggctcaaagaatggcatgccggagatcaactacaaactctgcgcacgtaagatgctcatgattgatagagtcaccagcattgaccataagggaggtgtgtacggtttgggtcagttggttggtgagaaaatcttggagagggaccattggtacttcccatgccattttgttaaggatcaagtcatggctggatctcttgtcagcgacggttgttcacaaatgctcaagatgtacatgatctggctcggtttgcaccttaccaccggaccatttgacttcagacccgtcaacggacacccgaacaaagttaggtgtaggggtcagatatctcctcataagggaaagttggtctacgtcatggagatcaaagagatgggattcgacgaggataacgatccgtacgccattgctgacgtcaacatcattgacgttgatttcgaaaagggtcaagatttcagccttgatagaatcagcgactacggaaagggggatcttaacaaaaagatcgtcgtggacttcaagggcattgctctcaagatgcagaagagatccacgaacaagaacccctccaaagttcagcccgtttttgctaacggtgcagccactgtgggaccggaagcgtccaaggccagctctggtgccagtgctagtgcttctgctgcccctgcgaagcctgctttctcagcagatgttcttgcgccaaagccagttgcacttcctgaacatatcctcaagggtgacgctctcgctccgaaagaaatgtcctggcatcccatgtcaaaacttcctggcaacccgacgccgttcttctcccctagttcttaccctccgagggcaatttgcttcatccctttccctggcaacccacttgacaacaattgcaaagctggagaaatgcctctgaactggtacaacatgtcagagttcatgtgtggaaaagttagcaactgcttgggaccagagttcgcaagatttgataagtcaaatacgagcagaagccctgcttttgatttggctcttgtgactagagttgttgaagtcacaaacatggaacatggcaagttcctgaatgttgattgcaatcccagcaaaggcacaatggtgggggagtttgactgtcctcaagatgcgtggttctttgatggttcttgcaatgatgggcacatgccttattccatcatcatggaaatcggacttcagacatccggtgttctcaccagtgtgttgaaagcaccactgacgatggacaaagatgacattctctttaggaaccttgatgcaagtgctgaaatggtgaggccagatgtggatgtgagggggaaaaccataaggaatgtgaccaagtgcactggatatgcaatgttgggaaagatggggattcacagattcacgtttgagttgtctgttgatggcgtggttttctacaaaggaagcacttcctttggatggttcactccagaggtgtttgctcagcaagctggacttgacaatgggaaaaagacggagccttggtgcaaaactaacaacacgagtgtgagaagagttgaaatcgcatcagccaaaggcaaagaacagctgactgagaaacttccagatgcaactaatgctcaagttctcagaaggtcagaacagtgtgagtatttggattacctcaacattgctcctgattctgggctgcatgggaaaggatatgcgcatggacacaaagatgttaacccacaagactggttcttctcttgtcacttttggtttgatcctgtgatgcctggatctttgggaattgagtcaatgttccagctcattgaggcatttgcggtggaccagaacataccgggagaatacaatgtgagcaatccgacctttgcccatgcccctggaaaaacggcgtggaagtaccgtggtcaattgacaccaaagaaccgtgcgatggactgtgaggtgcacatagtttcaatcacagcctctcctgaaaatggaggctacgttgacatagtggcagatggagcactttgggttgatggtctccgtgtgtatgaagccaaagaactcagagttcgtgttgtcagtgcaaaacctcaagccattccggatgttcaacaacagccacccagcgcaaaagcggaccctgggaaaactggagttgcactcagtccgactcagttgagagatgtcctgcttgaagtggacaatccattgtatcttggtgttgaaaactccaatttggtgcagtttgaatccaaacctgcaacttcttcaaggattgtcagtatcaaaccatgctccataagtgatcttggtgacaagtccttcatggaaacgtacaatgtgtcagcacctctgtacactggagcaatggccaagggaattgcgtctgcggaccttgtcattgctgctgggaagaggaagatattgggttcttttggagcgggtgggcttccaatgcaccatgtgagggcagctttggagaagatacaagcggctctgcctcaaggaccatatgctgtgaacctcattcattcaccttttgacagcaacttggaaaaggggaatgttgatctcttcctcgaaaagggcgttactgtggtggaggcttctgcattcatgaccctcactccccaagttgttcgttaccgtgcagccggactctcaaggaacgctgatgggagtgtcaacatcagaaaccgtatcattggaaaagtgtccagaacagaactcgccgaaatgttcatcagaccggctccggaacacctccttgagaaactcatagcttctggtgagataacacaagaacaagccgaacttgcccgtcgtgttcctgtcgcagacgacatcgctgttgaagctgattctggtggtcacactgacaaccgtcccatccacgtcatcttgcctttgatcatcaaccttaggaacagactgcacagagagtgtggttatcctgcgcaccttagagtcagagttggagctggaggcggtgttggctgcccacaagctgctgcggctgccctcacaatgggagctgccttcatagtgactgggactgtcaatcaagttgctaaacagtccgggacatgtgacaacgtgagaaaacaactcagtcaagccacctacagtgacatttgcatggctccagcagctgatatgtttgaggaaggtgtgaaactccaagttctcaagaagggaacaatgttcccatcaagagctaacaaattgtacgaactcttttgcaagtacgactctttcgattcaatgcctcctgctgaacttgaaaggatcgagaagaggatcttcaagagggcacttcaagaggtctgggaagagaccaaggacttttacatcaatggtttgaagaatccagagaagatacagagagcggaacatgaccccaaactcaagatgtctttgtgtttcagatggtatcttggtcttgcatcacgttgggccaacatgggtgctcctgatcgtgtcatggactatcaagtctggtgtggtccagccattggagccttcaatgacttcatcaaaggaacatatcttgatcctgctgtctctaatgagtacccatgtgttgtccagatcaaccttcagattttgcgtggtgcatgttacctgaggcgtcttaatgctctgagaaatgatccgaggattgatcttgagactgaagatgctgcctttgtctatgagccaacgaatgcgctttgagtagttagcttaatcacttaggtcacccagtccaagcccggcctagcacgatgatcatgagtgttgctattgatgtatgttaatactatacacagtcatcgtgtgtgttttataaaactgtaagcttaggatgtttgaggctaatgtaattagcactacaccgtaataaatgagaggtttactttatgttttaataatgttcttacccttgctgctctctaaactgtaatggcgtacggttagctaaactaaagtaaaaatcgattcgcttgagtaaaattagtgaccgggaaagatcatcgactactactgctcagagatgtaatcggtaattaagacttcaagctcaataattaattaggagtaaatctggcttcgaatttttaaattgtcaacttccaaagaaggattggcaagactcaatctcaattgcccaacaaacatatggctctttacaaatttggaatctctttttgatggcaagaacgtcgtaattcctctgtcgatctcatgtaattaccaaactcatctacttattactttctttatatgcacttactgatgcggccgcttaattaatcacgagtggatgactgtcacgactgactcatgactgactactagtgctagcctcgaggtcgacacaactttgtataataaagttgtctagacctaggagctgtgctgggtaactcacatgagtcactggtcacatcagcggccgcagatctgattggtaagatatgggtactgtttggtttatatgttttgactattcagtcactatggcccccataaattttaattcggctggtatgtctcggttaagaccggtttgacatggttcatttcagttcaattatgttaatctggcacgtgatatgtttaccttcacacgaacattagtaatgatgggctaatttaagacttaacaggcctagagaggcccatcttattacgtaacggcgtcgtttagagtgcaccaagcttataaatgaaaacgagctacctcgggacatcacgctctttgtacactccgccatctctctctctcgttggagcagatctctctcgtgaatatcgacaatgcttcagcacacttggcttccgaagcctcccaatctgaccctcttgtcagatgaggttcatctctggaggattcctcttgaccagcctgagtcacaacttcaagaccttgctgccaccctgagcagtgatgaattggcgagggcaaacagattctactttccagaacacagaaggcgtttcactgctgggagaggcatcctcagatccatcttgggtggatacttgggagtggaaccgggtcaagtcaagtttgattatgagtcccgtgggaaaccgatccttggtgacagatttgctgagagtggactcctgttcaacttgtctcacagccagaaccttgccttgtgtgctgtcaactacacgcgtcaaataggcattgatcttgaatatctgcgtccaacatctgacttggagtctcttgcaaagaggttctttctcccaagagaatatgaactcttgaggtcactccctgatgagcagaaacagaagattttctttcgttactggacttgcaaagaggcttatctcaaagcaacgggagatggaatagccaaacttgaagagatcgagatagcactcaccccaacagaacctgccaagctccaaacagctcctgcgtggtctctgttggagcttgtgccagatgacaattgtgttgcagctgtggctgttgcgggttttggttggcagcccaagttctggcattactgagtagttagcttaatcacttaggtcaccctatcaaaatctatttagaaatacacaatattttgttgcaggcttgctggagaatcgatctgctatcataaaaattacaaaaaaattttatttgcctcaattattttaggattggtattaaggacgcttaaattatttgtcgggtcactacgcatcattgtgattgagaagatcagcgatacgaaatattcgtagtactatcgataatttatttgaaaattcataagaaaagcaaacgttacatgaattgatgaaacaatacaaagacagataaagccacgcacatttaggatattggccgagattactgaatattgagtaagatcacggaatttctgacaggagcatgtcttcaattcagcccaaatggcagttgaaatactcaaaccgccccatatgcaggagcggatcattcattgtttgtttggttgcctttgccaacatgggagtccaaggttgcggccgcttaattaactactgtcactgaggccgtagacgagtacggactgatctaactagtgctagcctcgaggtcgacacccagctttcttgtacaaagtggttgcggccgcttaattaaatttaaattcaattaatgcaatcttgattttcaacaacgaaggtaatggcgtaaaagaaaaaatgtatgttattgtattgatctttcatgatgttgaagcgtgccataatatgatgatgtataattaaaatattaactgtcgcattttattgaaatggcactgttatttcaaccatatctttgattctgttacatgacacgactgcaagaagtaaataatagacgccgttgttaaagaattgctatcatatgtgcctaactagagggaatttgagcgtcagacctaatcaaatattacaaaatatctcactctgtcgccagcaatggtgtaatcagcgcagacaaatggcgtaaagatcgcggaaaaacctccccgagtggcatgatagctgcctctgtattgctgatttagtcagccttatttgacttaagggtgccctcgttagtgacaaattgctttcaaggagacagccatgccccacactttgttgaaaaacaaattgcctttggggagacggtaaagccagttgctcttcaataaggaatgtcgaggaggcaatgtaaccgcctctggtagtacacttctctaatccaaaaatcaatttgtattcaagataccgcaaaaaacttatggtttaaaccctgcaggactagtccagaaggtaattatccaagatgtagcatcaagaatccaatgtttacgggaaaaactatggaagtattatgtaagctcagcaagaagcagatcaatatgcggcacatatgcaacctatgttcaaaaatgaagaatgtacagatacaagatcctatactgccagaatacgaagaagaatacgtagaaattgaaaaagaagaaccaggcgaagaaaagaatcttgaagacgtaagcactgacgacaacaatgaaaagaagaagataaggtcggtgattgtgaaagagacatagaggacacatgtaaggtggaaaatgtaagggcggaaagtaaccttatcacaaaggaatcttatcccccactacttatccttttatatttttccgtgtcatttttgcccttgagttttcctatataaggaaccaagttcggcatttgtgaaaacaagaaaaaatttggtgtaagctattttctttgaagtactgaggatacaacttcagagaaatttgtaagtttgtaggtaccagatctggatcccaaaccatgtctccggagaggagaccagttgagattaggccagctacagcagctgatatggccgcggtttgtgatatcgttaaccattacattgagacgtctacagtgaactttaggacagagccacaaacaccacaagagtggattgatgatctagagaggttgcaagatagatacccttggttggttgctgaggttgagggtgttgtggctggtattgcttacgctgggccctggaaggctaggaacgcttacgattggacagttgagagtactgtttacgtgtcacataggcatcaaaggttgggcctaggatctacattgtacacacatttgcttaagtctatggaggcgcaaggttttaagtctgtggttgctgttataggccttccaaacgatccatctgttaggttgcatgaggctttgggatacacagcccggggtacattgcgcgcagctggatacaagcatggtggatggcatgatgttggtttttggcaaagggattttgagttgccagctcctccaaggccagttaggccagttacccaaatctgagtagttagcttaatcacctagagctcgatcggcggcaatagcttcttagcgccatcccgggttgatcctatctgtgttgaaatagttgcggtgggcaaggctctctttcagaaagacaggcggccaaaggaacccaaggtgaggtgggctatggctctcagttccttgtggaagcgcttggtctaaggtgcagaggtgttagcgggatgaagcaaaagtgtccgattgtaacaagatatgttgatcctacgtaaggatattaaagtatgtattcatcactaatataatcagtgtattccaatatgtactacgatttccaatgtctttattgtcgccgtatgtaatcggcgtcacaaaataatccccggtgactttcttttaatccaggatgaaataatatgttattataatttttgcgatttggtccgttataggaattgaagtgtgcttgaggtcggtcgccaccactcccatttcataattttacatgtatttgaaaaataaaaatttatggtattcaatttaaacacgtatacttgtaaagaatgatatcttgaaagaaatatagtttaaatatttattgataaaataacaagtcaggtattatagtccaagcaaaaacataaatttattgatgcaagtttaaattcagaaatatttcaataactgattatatcagctggtacattgccgtagatgaaagactgagtgcgatattatggtgtaatacataggaattcgtttaaacgatctgcgtctaattttcggtccaacttgcacaggaaagacgtcgaccgcggtagctcttgcccagcagactgggcttccagtcctttcgctcgatcgggtccaatgttgtcctcagctgtgaaccggaagcggacgaccaacagtggaagaactgaaaggaacgagccgtctataccttgatgatcggcctctggtgaagggtatcatcgcagccaagcaagctcatgaaaggctgatgggggaggtgtataattatgaggcccacggcgggcttattctttagggaggatctatctcgttgctcaagtgcatggcgcaaagcagttattggagtgcggattttcgttggcatattattcgccacgagttagcagacgaagagaccttcatgaacgtggccaaggccagagttaagcagatgttacgccctgctgcaggcctttctattatccaatagttggttgatctttggaaagagcctcggctgaggcccatactgaaagagatcgatggatatcgatatgccatgttgtttgctagccagaaccagatcacatccgatatgctattgcagcttgacgcagatatggaggataagttgattcatgggatcgctcaggagtagctcatccatgcacgccgacaagaacagaaattccgtcgagttaacgcagccgcttacgacggattcgaaggtcatccattcggaatgtattagtttgcaccagctccgcgtcacacctgtcttcatttgaataagatgttagcaattgtttttagctttgtcttgttgtggcagggcggcaagtgcttcagacatcattctgttttcaaattttatgctggagaacagcttcttaattcctttggaaataatagactgcgtcttaaaattcagatgtctggatatagatatgattgtaaaataacctatttaagtgtcatttagaacataagttttatgaatgttcttccattttcgtcatcgaacgaataagagtaaatacaccttttttaacattacaaataagttcttatacgttgtttatacaccgggaatcatttccattattttcgcgcaaaagtcacggatattcgtgaaagcgacataaactgcgaaatttgcggggagtgtcttgagtttgcctcgaggctagcgcatgcacatagacacacacatcatctcattgatgcttggtaataattgtcattagattgtttttatgcatagatgcactcgaaatcagccaattttagacaagtatcaaacggatgtgacttcagtacattaaaaacgtccgcaatgtgttattaagttgtctaagcgtcaatttgatttacaattgaatatatcctgccccagccagccaacagctcgatttacaattgaatatatcctgccggccggcccacgcgtgtcgaggaattctgatctggcccccatttggacgtgaatgtagacacgtcgaaataaagatttccgaattagaataatttgtttattgctttcgcctataaatacgacggatcgtaatttgtcgttttatcaaaatgtactttcattttataataacgctgcggacatctacatttttgaattgaaaaaaaattggtaattactctttctttttctccatattgaccatcatactcattgctgatccatgtagatttcccggacatgaagccatttacaattgaatatatcctgccgccgctgccgctttgcacccggtggagcttgcatgttggtttctacgcagaactgagccggttaggcagataatttccattgagaactgagccatgtgcaccttccccccaacacggtgagcgacggggcaacggagtgatccacatgggacttttaaacatcatccgtcggatggcgttgcgagagaagcagtcgatccgtgagatcagccgacgcaccgggcaggcgcgcaacacgatcgcaaagtatttgaacgcaggtacaatcgagccgacgttcacgcggaacgaccaagcaagcttggctgccatttttggggtgaggccgttcgcggccgaggggcgcagcccctggggggatgggaggcccgcgttagcgggccgggagggttcgagaagggggggcaccccccttcggcgtgcgcggtcacgcgcacagggcgcagccctggttaaaaacaaggtttataaatattggtttaaaagcaggttaaaagacaggttagcggtggccgaaaaacgggcggaaacccttgcaaatgctggattttctgcctgtggacagcccctcaaatgtcaataggtgcgcccctcatctgtcagcactctgcccctcaagtgtcaaggatcgcgcccctcatctgtcagtagtcgcgcccctcaagtgtcaataccgcagggcacttatccccaggcttgtccacatcatctgtgggaaactcgcgtaaaatcaggcgttttcgccgatttgcgaggctggccagctccacgtcgccggccgaaatcgagcctgcccctcatctgtcaacgccgcgccgggtgagtcggcccctcaagtgtcaacgtccgcccctcatctgtcagtgagggccaagttttccgcgaggtatccacaacgccggcggccgcggtgtctcgcacacggcttcgacggcgtttctggcgcgtttgcagggccatagacggccgccagcccagcggcgagggcaaccagcccggtgagcgtcggaaagggtcgacggatcttttccgctgcataaccctgcttcggggtcattatagcgattttttcggtatatccatcctttttcgcacgatatacaggattttgccaaagggttcgtgtagactttccttggtgtatccaacggcgtcagccgggcaggataggtgaagtaggcccacccgcgagcgggtgttccttcttcactgtcccttattcgcacctggcggtgctcaacgggaatcctgctctgcgaggctggccggctaccgccggcgtaacagatgagggcaagcggatggctgatgaaaccaagccaaccaggaagggcagcccacctatcaaggtgtactgccttccagacgaacgaagagcgattgaggaaaaggcggcggcggccggcatgagcctgtcggcctacctgctggccgtcggccagggctacaaaatcacgggcgtcgtggactatgagcacgtccgcgagctggcccgcatcaatggcgacctgggccgcctgggcggcctgctgaaactctggctcaccgacgacccgcgcacggcgcggttcggtgatgccacgatcctcgccctgctggcgaagatcgaagagaagcaggacgagcttggcaaggtcatgatgggcgtggtccgcccgagggcagagccatgacttttttagccgctaaaacggccggggggtgcgcgtgattgccaagcacgtccccatgcgctccatcaagaagagcgacttcgcggagctggtattcgtgcagggcaagattcggaataccaagtacgagaaggacggccagacggtctacgggaccgacttcattgccgataaggtggattatctggacaccaaggcaccaggcgggtcaaatcaggaataagggcacattgccccggcgtgagtcggggcaatcccgcaaggagggtgaatgaatcggacgtttgaccggaaggcatacaggcaagaactgatcgacgcggggttttccgccgaggatgccgaaaccatcgcaagccgcaccgtcatgcgtgcgccccgcgaaaccttccagtccgtcggctcgatggtccagcaagctacggccaagatcgagcgcgacagcgtgcaactggctccccctgccctgcccgcgccatcggccgccgtggagcgttcgcgtcgtctcgaacaggaggcggcaggtttggcgaagtcgatgaccatcgacacgcgaggaactatgacgaccaagaagcgaaaaaccgccggcgaggacctggcaaaacaggtcagcgaggccaagcaggccgcgttgctgaaacacacgaagcagcagatcaaggaaatgcagctttccttgttcgatattgcgccgtggccggacacgatgcgagcgatgccaaacgacacggcccgctctgccctgttcaccacgcgcaacaagaaaatcccgcgcgaggcgctgcaaaacaaggtcattttccacgtcaacaaggacgtgaagatcacctacaccggcgtcgagctgcgggccgacgatgacgaactggtgtggcagcaggtgttggagtacgcgaagcgcacccctatcggcgagccgatcaccttcacgttctacgagctttgccaggacctgggctggtcgatcaatggccggtattacacgaaggccgaggaatgcctgtcgcgcctacaggcgacggcgatgggcttcacgtccgaccgcgttgggcacctggaatcggtgtcgctgctgcaccgcttccgcgtcctggaccgtggcaagaaaacgtcccgttgccaggtcctgatcgacgaggaaatcgtcgtgctgtttgctggcgaccactacacgaaattcatatgggagaagtaccgcaagctgtcgccgacggcccgacggatgttcgactatttcagctcgcaccgggagccgtacccgctcaagctggaaaccttccgcctcatgtgcggatcggattccacccgcgtgaagaagtggcgcgagcaggtcggcgaagcctgcgaagagttgcgaggcagcggcctggtggaacacgcctgggtcaatgatgacctggtgcattgcaaacgctagggccttgtggggtcagttccggctgggggttcagcagccagcgctttactggcatttcaggaacaagcgggcactgctcgacgcacttgcttcgctcagtatcgctcgggacgcacggcgcgctctacgaactgccgataaacagaggattaaaattgacaattgtgattaaggctcagattcgacggcttggagcggccgacgtgcaggatttccgcgagatccgattgtcggccctgaagaaagctccagagatgttcgggtccgtttacgagcacgaggagaaaaagcccatggaggcgttcgctgaacggttgcgagatgccgtggcattcggcgcctacatcgacggcgagatcattgggctgtcggtcttcaaacaggaggacggccccaaggacgctcacaaggcgcatctgtccggcgttttcgtggagcccgaacagcgaggccgaggggtcgccggtatgctgctgcgggcgttgccggcgggtttattgctcgtgatgatcgtccgacagattccaacgggaatctggtggatgcgcatcttcatcctcggcgcacttaatatttcgctattctggagcttgttgtttatttcggtctaccgcctgccgggcggggtcgcggcgacggtaggcgctgtgcagccgctgatggtcgtgttcatctctgccgctctgctaggtagcccgatacgattgatggcggtcctgggggctatttgcggaactgcgggcgtggcgctgttggtgttgacaccaaacgcagcgctagatcctgtcggcgtcgcagcgggcctggcgggggcggtttccatggcgttcggaaccgtgctgacccgcaagtggcaacctcccgtgcctctgctcacctttaccgcctggcaactggcggccggaggacttctgctcgttccagtagctttagtgtttgatccgccaatcccgatgcctacaggaaccaatgttctcggcctggcgtggctcggcctgatcggagcgggtttaacctacttcctttggttccgggggatctcgcgactcgaacctacagttgtttccttactgggctttctcagcccccgagcgcttagtgggaatttgtaccccttatcgaaccgggagcacaggatgacgcctaacaattcattcaagccgacaccgcttcgcggcgcggcttaattcaggagttaaacatcatgagggaagcggtgatcgccgaagtatcgactcaactatcagaggtagttggcgtcatcgagcgccatctcgaaccgacgttgctggccgtacatttgtacggctccgcagtggatggcggcctgaagccacacagtgatattgatttgctggttacggtgaccgtaaggcttgatgaaacaacgcggcgagctttgatcaacgaccttttggaaacttcggcttcccctggagagagcgagattctccgcgctgtagaagtcaccattgttgtgcacgacgacatcattccgtggcgttatccagctaagcgcgaactgcaatttggagaatggcagcgcaatgacattcttgcaggtatcttcgagccagccacgatcgacattgatctggctatcttgctgacaaaagcaagagaacatagcgttgccttggtaggtccagcggcggaggaactctttgatccggttcctgaacaggatctatttgaggcgctaaatgaaaccttaacgctatggaactcgccgcccgactgggctggcgatgagcgaaatgtagtgcttacgttgtcccgcatttggtacagcgcagtaaccggcaaaatcgcgccgaaggatgtcgctgccgactgggcaatggagcgcctgccggcccagtatcagcccgtcatacttgaagctaggcaggcttatcttggacaagaagatcgcttggcctcgcgcgcagatcagttggaagaatttgttcactacgtgaaaggcgagatcaccaaggtagtcggcaaataatgtctaacaattcgttcaagccgacgccgcttcgcggcgcggcttaactcaagcgttagagagctggggaagactatgcgcgatctgttgaaggtggttctaagcctcgtcttgcgatggcatttcgatccattcccattccgcgctcaagatggcttcccctcggcagttcatcagggctaaatcaatctagccgacttgtccggtgaaatgggctgcactccaacagaaacaatcaaacaaacatacacagcgacttattcacacgagctcaaattacaacggtatatatcctgccagtcagcatcatcacaccaaaagttaggcccgaatagtttgaaattagaaagctcgcaattgaggtctacaggccaaattcgctcttagccgtacaatattactcaccggatcctaaccggtttaattaaggcgcgccatgcccgggcaagcggccgcacaagttt

SEQ ID NO: 57 - DNA, 35154 bp, Artificial sequence
  plasmid pDAB9151
aattacaacggtatatatcctgccagtcagcatcatcacaccaaaagttaggcccgaatagtttgaaattagaaagctcgcaattgaggtctacaggccaaattcgctcttagccgtacaatattactcaccggatcctaaccggtttaattaaggcgcgccatgcccgggcaagcggccgcacaagtttgtacaaaaaagcaggcttctagacctaggactaggcactgagtgactcactgacctgactgagtgactggcggccgcagcttatagtaaagatttttttgttaataaaatgaaagttaatatttatggatttatttgaacatatttacaagtttttgttaataaatttatttacagaagtgttaaatttgaaaatgtgttaaatgagagttaatatttatggatataatattactttatttaaaaataaaatgaatttatattaaaatatgatttggtaaaagatattataaagaggaacttggatgagaaagacgacgatgggcaaaagttgcatggcacaccgcttttgttcagtaacatctgcactgtggcgcctttttcacactcaccatgcatgctgccacgtcagctttcacactatgacaccactggccatacacgttgccacctcagctttctcctcttctcactatgacacgactggccatgcatgcatgcatgctgccacctcagctcccgcctcttcacccgtgtctttctctcatgtcgcagtgctgcgtgccaacctcttctctctataaatagagagaagagaatgatggttaaactcaaaccaaaacaagaaaacatacacaaatagcaaaacggatccacaaccaaaaatggcgcttcgtgtcaagaccaacaagaagccatgttgggagatgaccaaggaggaactgacctctggcaaaactgaggtgttcaactatgaggaactcctggagtttgcagagggtgacatagctaaggtttttggtccggagtttgctgtcatagacaagtaccccagaagggtgaggctgcctgctcgtgaatacctgcttgtgacaagggtcacactcatggatgccgaggtcaacaactacagagttggtgccagaatggtcactgagtatgatcttccagtgaatggcgaattgtctgagggaggtgattgtccctgggcagttctggttgagagtggacagtgcgatttgatgctgatatcatacatgggaattgatttccagaaccaaggtgacagagtttaccgtctgctcaacaccacgttgacattctatggggttgcccatgagggagagacccttgagtatgacatcagagtgaccggttttgccaaacgtttggatggtggcatctccatgttcttctttgagtatgactgctatgtcaatgggaggcttctcattgagatgagagatggctgtgctggcttcttcacaaatgaggagcttgatgcgggaaagggtgtggtgttcacaagaggggatttggctgccagagctaagattccaaagcaagatgtttctccctatgctgtcgctccctgccttcacaaaacaaaactcaacgaaaaggagatgcagaccttggttgacaaagattgggcttccgtttttggctcaaagaatggcatgccggagatcaactacaaactctgcgcacgtaagatgctcatgattgatagagtcaccagcattgaccataagggaggtgtgtacggtttgggtcagttggttggtgagaaaatcttggagagggaccattggtacttcccatgccattttgttaaggatcaagtcatggctggatctcttgtcagcgacggttgttcacaaatgctcaagatgtacatgatctggctcggtttgcaccttaccaccggaccatttgacttcagacccgtcaacggacacccgaacaaagttaggtgtaggggtcagatatctcctcataagggaaagttggtctacgtcatggagatcaaagagatgggattcgacgaggataacgatccgtacgccattgctgacgtcaacatcattgacgttgatttcgaaaagggtcaagatttcagccttgatagaatcagcgactacggaaagggggatcttaacaaaaagatcgtcgtggacttcaagggcattgctctcaagatgcagaagagatccacgaacaagaacccctccaaagttcagcccgtttttgctaacggtgcagccactgtgggaccggaagcgtccaaggccagctctggtgccagtgctagtgcttctgctgcccctgcgaagcctgctttctcagcagatgttcttgcgccaaagccagttgcacttcctgaacatatcctcaagggtgacgctctcgctccgaaagaaatgtcctggcatcccatgtcaaaacttcctggcaacccgacgccgttcttctcccctagttcttaccctccgagggcaatttgcttcatccctttccctggcaacccacttgacaacaattgcaaagctggagaaatgcctctgaactggtacaacatgtcagagttcatgtgtggaaaagttagcaactgcttgggaccagagttcgcaagatttgataagtcaaatacgagcagaagccctgcttttgatttggctcttgtgactagagttgttgaagtcacaaacatggaacatggcaagttcctgaatgttgattgcaatcccagcaaaggcacaatggtgggggagtttgactgtcctcaagatgcgtggttctttgatggttcttgcaatgatgggcacatgccttattccatcatcatggaaatcggacttcagacatccggtgttctcaccagtgtgttgaaagcaccactgacgatggacaaagatgacattctctttaggaaccttgatgcaagtgctgaaatggtgaggccagatgtggatgtgagggggaaaaccataaggaatgtgaccaagtgcactggatatgcaatgttgggaaagatggggattcacagattcacgtttgagttgtctgttgatggcgtggttttctacaaaggaagcacttcctttggatggttcactccagaggtgtttgctcagcaagctggacttgacaatgggaaaaagacggagccttggtgcaaaactaacaacacgagtgtgagaagagttgaaatcgcatcagccaaaggcaaagaacagctgactgagaaacttccagatgcaactaatgctcaagttctcagaaggtcagaacagtgtgagtatttggattacctcaacattgctcctgattctgggctgcatgggaaaggatatgcgcatggacacaaagatgttaacccacaagactggttcttctcttgtcacttttggtttgatcctgtgatgcctggatctttgggaattgagtcaatgttccagctcattgaggcatttgcggtggaccagaacataccgggagaatacaatgtgagcaatccgacctttgcccatgcccctggaaaaacggcgtggaagtaccgtggtcaattgacaccaaagaaccgtgcgatggactgtgaggtgcacatagtttcaatcacagcctctcctgaaaatggaggctacgttgacatagtggcagatggagcactttgggttgatggtctccgtgtgtatgaagccaaagaactcagagttcgtgttgtcagtgcaaaacctcaagccattccggatgttcaacaacagccacccagcgcaaaagcggaccctgggaaaactggagttgcactcagtccgactcagttgagagatgtcctgcttgaagtggacaatccattgtatcttggtgttgaaaactccaatttggtgcagtttgaatccaaacctgcaacttcttcaaggattgtcagtatcaaaccatgctccataagtgatcttggtgacaagtccttcatggaaacgtacaatgtgtcagcacctctgtacactggagcaatggccaagggaattgcgtctgcggaccttgtcattgctgctgggaagaggaagatattgggttcttttggagcgggtgggcttccaatgcaccatgtgagggcagctttggagaagatacaagcggctctgcctcaaggaccatatgctgtgaacctcattcattcaccttttgacagcaacttggaaaaggggaatgttgatctcttcctcgaaaagggcgttactgtggtggaggcttctgcattcatgaccctcactccccaagttgttcgttaccgtgcagccggactctcaaggaacgctgatgggagtgtcaacatcagaaaccgtatcattggaaaagtgtccagaacagaactcgccgaaatgttcatcagaccggctccggaacacctccttgagaaactcatagcttctggtgagataacacaagaacaagccgaacttgcccgtcgtgttcctgtcgcagacgacatcgctgttgaagctgattctggtggtcacactgacaaccgtcccatccacgtcatcttgcctttgatcatcaaccttaggaacagactgcacagagagtgtggttatcctgcgcaccttagagtcagagttggagctggaggcggtgttggctgcccacaagctgctgcggctgccctcacaatgggagctgccttcatagtgactgggactgtcaatcaagttgctaaacagtccgggacatgtgacaacgtgagaaaacaactcagtcaagccacctacagtgacatttgcatggctccagcagctgatatgtttgaggaaggtgtgaaactccaagttctcaagaagggaacaatgttcccatcaagagctaacaaattgtacgaactcttttgcaagtacgactctttcgattcaatgcctcctgctgaacttgaaaggatcgagaagaggatcttcaagagggcacttcaagaggtctgggaagagaccaaggacttttacatcaatggtttgaagaatccagagaagatacagagagcggaacatgaccccaaactcaagatgtctttgtgtttcagatggtatcttggtcttgcatcacgttgggccaacatgggtgctcctgatcgtgtcatggactatcaagtctggtgtggtccagccattggagccttcaatgacttcatcaaaggaacatatcttgatcctgctgtctctaatgagtacccatgtgttgtccagatcaaccttcagattttgcgtggtgcatgttacctgaggcgtcttaatgctctgagaaatgatccgaggattgatcttgagactgaagatgctgcctttgtctatgagccaacgaatgcgctttgagtagttagcttaatcacttaggtcacccagtccaagcccggcctagcacgatgatcatgagtgttgctattgatgtatgttaatactatacacagtcatcgtgtgtgttttataaaactgtaagcttaggatgtttgaggctaatgtaattagcactacaccgtaataaatgagaggtttactttatgttttaataatgttcttacccttgctgctctctaaactgtaatggcgtacggttagctaaactaaagtaaaaatcgattcgcttgagtaaaattagtgaccgggaaagatcatcgactactactgctcagagatgtaatcggtaattaagacttcaagctcaataattaattaggagtaaatctggcttcgaatttttaaattgtcaacttccaaagaaggattggcaagactcaatctcaattgcccaacaaacatatggctctttacaaatttggaatctctttttgatggcaagaacgtcgtaattcctctgtcgatctcatgtaattaccaaactcatctacttattactttctttatatgcacttactgatgcggccgcttaattaatcacgagtggatgactgtcacgactgactcatgactgactactagtgctagcctcgaggtcgacacaactttgtatacaaaagttgtctagacctaggctcagcaactcatccagtcaagttcgagtcagtgagttgggcggccgcagcttatagtaaagatttttttgttaataaaatgaaagttaatatttatggatttatttgaacatatttacaagtttttgttaataaatttatttacagaagtgttaaatttgaaaatgtgttaaatgagagttaatatttatggatataatattactttatttaaaaataaaatgaatttatattaaaatatgatttggtaaaagatattataaagaggaacttggatgagaaagacgacgatgggcaaaagttgcatggcacaccgcttttgttcagtaacatctgcactgtggcgcctttttcacactcaccatgcatgctgccacgtcagctttcacactatgacaccactggccatacacgttgccacctcagctttctcctcttctcactatgacacgactggccatgcatgcatgcatgctgccacctcagctcccgcctcttcacccgtgtctttctctcatgtcgcagtgctgcgtgccaacctcttctctctataaatagagagaagagaatgatggttaaactcaaaccaaaacaagaaaacatacacaaatagcaaaacggatccacaaccaaaaatggctgcaaggaacgtgagtgcggctcatgagatgcatgacgagaagaggatagctgttgtgggcatggctgttcagtatgctggatgcaaaacgaaagacgagttctgggaagttctcatgaatggaaaagttgagagcaaagtgatcagcgacaaacgtcttggttcaaattaccgtgctgaacactacaaagctgaaaggagcaagtatgctgacaccttctgcaatgagacatatggaactcttgatgagaacgaaatagacaatgagcatgaactccttttgaaccttgccaaacaagccttggctgaaacatctgtcaaagattcaacaagatgtggcatagtttctggatgcctcagcttcccgatggacaacctccaaggtgaactcttgaatgtgtaccagaaccatgttgagaagaaacttggtgccagagttttcaaagatgcctctcactggtcagaaagagaacagtccaacaaaccagaggctggtgacagaagaatcttcatggaccctgcttcctttgttgctgaggaactcaatcttggcgctctccactactctgttgatgctgcctgtgccactgcgctctatgtgctcagactggcgcaagatcacttggtctctggtgcagctgatgtgatgctttgtggtgcaacatgcctgccggagccgtttttcatactctctgggttctcaaccttccaagccatgcctgttggaacgggtcagaatgtgtccatgccgctgcacaaagattctcaaggattgacccctggtgaaggaggttccatcatggtcctcaaacgtttggatgacgcaatcagagatggagatcacatctatggaacacttttgggagccaatgtcagcaacagtggcactggtctgccacttaaaccccttttgccgtcagagaaaaagtgcctcatggacacctacacacgtatcaatgtgcatccccacaagattcagtatgttgaatgccatgcaactgggactccacaaggtgatcgtgtggaaattgatgctgtgaaggcttgctttgaaggcaaagtcccacgttttggaaccacaaaagggaactttggacacacattggtggcagctgggtttgctggcatgtgcaaagtgcttctctccatgaagcacgggatcattccacccactccgggaatagatgacgaaacgaagatggaccctctggttgtctctggtgaggccattccctggccagaaacgaatggagaaccgaagcgtgctggtctctcagcgtttggatttggtgggaccaatgctcatgctgtctttgaggaacatgacccaagcaatgctgcatgcactggccatgactccatttctgctctctctgcacgttgtggtggtgagtcaaacatgagaatagcaatcactgggatggatgccacttttggtgctttgaaaggattggatgcttttgaaagggccatctacactggtgctcatggtgctataccactcccagaaaagagatggagattcctggggaaagacaaggacttccttgatctttgtggagtcaaagcaacaccgcatggctgttacattgaagatgttgaagttgatttccagaggctgaggactccaatgactcctgaagatatgctcttgcctcaacagcttctggctgtcaccacaattgatagggccatattggactctggcatgaagaaaggtggaaatgtggctgtctttgtggggttggggaccgatcttgaactctaccgtcaccgtgcaagggttgctctcaaggagagagtgaggcctgaagccagcaagaaactcaatgacatgatgcagtacatcaatgattgtgggacaagcacttcttacaccagctacataggcaacttggttgcaacaagggtcagttcacaatggggcttcacgggaccttccttcacaatcacagaaggcaacaattctgtgtacagatgtgctgaacttggcaaatacctcttggaaacgggagaggttgatggggttgtggttgcgggtgttgatctctgtgggagtgctgagaacctttacgtcaagtcaaggcgtttcaaggtgtctacatctgacaccccgagagccagctttgatgcagctgctgatggttactttgttggagagggctgtggtgcatttgtgctcaagcgtgagacaagctgcaccaaggatgacagaatctatgcttgcatggatgccatagttcctggaaatgttccatctgcatgtttgagagaggcattggatcaagccagagtcaagcctggagacatcgagatgttggagctttctgctgattcagcgaggcatttgaaggacccgtctgttctcccaaaggaactcactgctgaggaagagattggcggacttcagacgattcttcgtgacgatgacaagctcccaaggaatgttgcaactggaagtgtcaaggccactgttggtgacactggttatgcttctggtgctgccagtttgattaaggctgcgctttgcatctacaaccgttacctgcccagcaatggagatgactgggatgaacctgcacctgaagcaccctgggacagcacactctttgcgtgccagacctcaagagcttggttgaagaaccctggtgagagacgttatgcggctgtttccggagtcagtgaaaccagaagttgctacagtgtgctgctttctgaagcagagggacactacgagagagagaacagaatcagtttggatgaggaagcacccaagctcattgtgttgagagcagactcccatgaagagattcttggaagattggacaagataagggaaaggttcttgcagcccacgggtgctgcacccagagagtctgaattgaaggcgcaagcccgtaggatctttcttgaactccttggtgagacccttgcccaagatgcagcttcatctggaagtcagaagccccttgctctcagcttggtctccactccatccaagctccagagagaggtggaacttgcggcaaaaggcattccgagatgtctcaagatgagacgtgattggagttcccctgctggaagcagatatgcgcctgagcctttggccagtgacagagttgccttcatgtatggagaaggaaggagcccttactatggcatcacacaagacattcataggatttggcctgaacttcatgaggtcatcaatgagaaaacaaaccgtctctgggctgaaggtgacagatgggtcatgccaagggccagcttcaagagtgagcttgagtcacaacagcaagagtttgacagaaacatgattgaaatgttccgtcttggaatcctcacctcaattgccttcacaaacctggcgagagatgttctcaacatcacgcccaaagcagcctttggactcagtttgggagagatttccatgatctttgctttctccaagaaaaacggtttgataagcgatcagttgacaaaggatttgagagagtcagatgtctggaacaaagctctggctgttgagttcaatgcgctcagagaagcctggggcattccacagtctgtcccaaaagatgagttctggcaaggttacatagtgaggggaacgaaacaagacatagaagcagccatagcaccagactcaaagtatgtgaggttgaccatcatcaatgatgccaacactgctctcatcagtggaaagcctgatgcatgcaaagctgcgattgctcgtcttggtggcaacatccctgcgcttccagtcactcaaggcatgtgtgggcattgcccagaggtgggaccttacaccaaggacatcgcaaagatccacgccaaccttgagttccctgtggttgatggtcttgatctctggactaccataaaccagaagaggcttgtgccaagagccacgggtgccaaagatgaatgggctccttcatcctttggggagtatgctggacagctctatgagaaacaagccaacttccctcagatagttgaaaccatctacaagcagaactatgatgtgtttgttgaagttgggccaaacaatcacagaagcacagcagtgagaaccacgcttggaccacagagaaaccaccttgctggtgccatagacaagcagaacgaggatgcttggacgacaatagtcaagctcgtggcttcattgaaggctcaccttgttcctggagtgaccatcagtccgctctaccactccaagctcgttgcagaggctgaggcttgttatgctgcgctctgtaaaggtgagaaacccaagaaaaacaagtttgtgagaaagattcagttgaatggcagattcaacagcaaggcagaccccatctcctcagcagaccttgcatccttcccacctgcggaccctgcgattgaagctgccatctcttcaaggatcatgaagcctgtggctccgaaattctatgcgcgtctcaacattgatgagcaagatgagaccagagatccgatcttgaacaaggacaatgcgccttccagctccagctcttccagcagttcctcttccagcagttcatctccgtctcctgctccttcagctccagttcagaagaaagctgccccagctgcggagacaaaagctgttgccagtgctgatgcacttcgtagtgccctgcttgatcttgactccatgcttgcgctcagctctgcaagtgcttctggcaaccttgttgagactgcgccatctgatgccagtgtcattgtccctccgtgcaacattgctgatcttggcagcagagctttcatgaaaacttatggtgtttctgcgcctctgtacaccggtgcaatggccaagggaattgcctctgcggacttggtgatcgcagctggaaggcaaggaatccttgcgtcatttggtgctggaggccttccaatgcaagttgtgcgtgagtccattgaaaagattcaagctgccctgcccaatggaccatatgctgtcaacctcatccattctccttttgacagcaaccttgagaagggaaatgttgatctcttcttggaaaagggtgtcacttttgttgaggcttcagccttcatgacgttgacaccgcaagttgtcagatacagagcggctgggttgacgaggaatgcagatgggtcagtcaacataaggaacagaatcattgggaaagtctccagaactgagctggctgaaatgttcatgcgtcctgcacctgagcatcttttgcagaagctcattgcttctggggagatcaatcaagaacaagctgagttggccagacgtgttcctgtggctgatgacattgcggttgaagctgattctggtggacacactgacaaccgtccaatccatgtcattctgcctctgattatcaacctgagggataggcttcacagagagtgtggatacccagcaaacctgagggttcgtgttggtgctgggggtggcattgggtgtccccaagctgcgctggcaactttcaacatgggtgcctctttcattgtcactggaacagtgaaccaagttgccaaacaatctgggacgtgtgacaatgtgaggaaacagcttgcgaaagcaacttactcagatgtttgcatggcaccggcagctgacatgtttgaggaaggtgtgaaacttcaagttttgaagaaaggaacaatgttcccttcaagagccaacaaactctatgagttgttctgcaagtatgattcttttgagtccatgcctccagcagagcttgcgagggttgagaaaagaatcttcagtcgtgcattggaagaggtctgggatgagaccaagaacttctacatcaaccgtctccacaacccagagaagatacagagggctgagagggaccccaaactgaagatgtcactgtgtttcagatggtatctgtccctggcttcaaggtgggccaacactggagcttctgacagagtcatggactaccaagtttggtgtggtcctgccattggttcattcaatgatttcatcaaaggaacttaccttgatccggcagtggcaaatgagtacccgtgtgttgtgcagatcaacaaacagattcttagaggagcgtgcttcttgaggcgtcttgaaatactgagaaatgcaaggctttcagatggtgcagctgcacttgtggcgagcattgatgacacatatgtccctgctgagaagctgtgagtagttagcttaatcacttaggtcacccagtccaagcccggcctagcacgatgatcatgagtgttgctattgatgtatgttaatactatacacagtcatcgtgtgtgttttataaaactgtaagcttaggatgtttgaggctaatgtaattagcactacaccgtaataaatgagaggtttactttatgttttaataatgttcttacccttgctgctctctaaactgtaatggcgtacggttagctaaactaaagtaaaaatcgattcgcttgagtaaaattagtgaccgggaaagatcatcgactactactgctcagagatgtaatcggtaattaagacttcaagctcaataattaattaggagtaaatctggcttcgaatttttaaattgtcaacttccaaagaaggattggcaagactcaatctcaattgcccaacaaacatatggctctttacaaatttggaatctctttttgatggcaagaacgtcgtaattcctctgtcgatctcatgtaattaccaaactcatctacttattactttctttatatgcacttactgatgcggccgcttaattaatctgacctgaccactagacctgagtgagtacagatgtgctactagtgctagcctcgaggtcgaccaacttttctatacaaagttgtctagacctaggagctgtgctgggtaactcacatgagtcactggtcacatcagcggccgcagcttatagtaaagatttttttgttaataaaatgaaagttaatatttatggatttatttgaacatatttacaagtttttgttaataaatttatttacagaagtgttaaatttgaaaatgtgttaaatgagagttaatatttatggatataatattactttatttaaaaataaaatgaatttatattaaaatatgatttggtaaaagatattataaagaggaacttggatgagaaagacgacgatgggcaaaagttgcatggcacaccgcttttgttcagtaacatctgcactgtggcgcctttttcacactcaccatgcatgctgccacgtcagctttcacactatgacaccactggccatacacgttgccacctcagctttctcctcttctcactatgacacgactggccatgcatgcatgcatgctgccacctcagctcccgcctcttcacccgtgtctttctctcatgtcgcagtgctgcgtgccaacctcttctctctataaatagagagaagagaatgatggttaaactcaaaccaaaacaagaaaacatacacaaatagcaaaacggatccacaaccaaaaatgcttcagcacacttggcttccgaagcctcccaatctgaccctcttgtcagatgaggttcatctctggaggattcctcttgaccagcctgagtcacaacttcaagaccttgctgccaccctgagcagtgatgaattggcgagggcaaacagattctactttccagaacacagaaggcgtttcactgctgggagaggcatcctcagatccatcttgggtggatacttgggagtggaaccgggtcaagtcaagtttgattatgagtcccgtgggaaaccgatccttggtgacagatttgctgagagtggactcctgttcaacttgtctcacagccagaaccttgccttgtgtgctgtcaactacacgcgtcaaataggcattgatcttgaatatctgcgtccaacatctgacttggagtctcttgcaaagaggttctttctcccaagagaatatgaactcttgaggtcactccctgatgagcagaaacagaagattttctttcgttactggacttgcaaagaggcttatctcaaagcaacgggagatggaatagccaaacttgaagagatcgagatagcactcaccccaacagaacctgccaagctccaaacagctcctgcgtggtctctgttggagcttgtgccagatgacaattgtgttgcagctgtggctgttgcgggttttggttggcagcccaagttctggcattactgagtagttagcttaatcacttaggtcacccagtccaagcccggcctagcacgatgatcatgagtgttgctattgatgtatgttaatactatacacagtcatcgtgtgtgttttataaaactgtaagcttaggatgtttgaggctaatgtaattagcactacaccgtaataaatgagaggtttactttatgttttaataatgttcttacccttgctgctctctaaactgtaatggcgtacggttagctaaactaaagtaaaaatcgattcgcttgagtaaaattagtgaccgggaaagatcatcgactactactgctcagagatgtaatcggtaattaagacttcaagctcaataattaattaggagtaaatctggcttcgaatttttaaattgtcaacttccaaagaaggattggcaagactcaatctcaattgcccaacaaacatatggctctttacaaatttggaatctctttttgatggcaagaacgtcgtaattcctctgtcgatctcatgtaattaccaaactcatctacttattactttctttatatgcacttactgatgcggccgcttaattaactactgtcactgaggccgtagacgagtacggactgatctaactagtgctagcctcgaggtcgacacaactttgtataataaagttgtctagacctaggtggagtcatcacgcagactatctcagcatgtgcgtagcacgcggccgcagcttatagtaaagatttttttgttaataaaatgaaagttaatatttatggatttatttgaacatatttacaagtttttgttaataaatttatttacagaagtgttaaatttgaaaatgtgttaaatgagagttaatatttatggatataatattactttatttaaaaataaaatgaatttatattaaaatatgatttggtaaaagatattataaagaggaacttggatgagaaagacgacgatgggcaaaagttgcatggcacaccgcttttgttcagtaacatctgcactgtggcgcctttttcacactcaccatgcatgctgccacgtcagctttcacactatgacaccactggccatacacgttgccacctcagctttctcctcttctcactatgacacgactggccatgcatgcatgcatgctgccacctcagctcccgcctcttcacccgtgtctttctctcatgtcgcagtgctgcgtgccaacctcttctctctataaatagagagaagagaatgatggttaaactcaaaccaaaacaagaaaacatacacaaatagcaaaacggatccacaaccaaaaatggcagcgaggctgcaagagcagaaaggaggtgagatggacacgaggattgcgatcataggcatgagcgccatacttccttgtggaaccacggtgagagagtcatgggagaccataagggctggcattgattgcctgtctgatcttcctgaggatcgtgttgatgtgactgcgtactttgacccagtcaagaccacaaaggacaaaatctactgcaagagaggaggtttcattcctgagtatgactttgatgcgcgtgagtttggtctcaacatgttccagatggaagattctgatgcgaatcagaccatctcacttctcaaggtcaaagaagcacttcaagatgctgggattgatgcacttggaaaggagaagaaaaacataggatgcgtgcttggcattggaggtggacagaagagttcacatgagttctacagcagactcaactatgtggttgtggagaaagtcttgagaaagatggggatgccagaggaagatgtcaaagtggctgtggagaagtacaaagcgaacttcccagaatggagacttgactctttccctggattccttgggaatgtcactgctggcagatgcaccaacacattcaacttggatggcatgaactgcgttgtggatgctgcatgtgcaagctccttgatagcagtcaaggttgcgattgatgaactgctctatggtgactgcgacatgatggtcactggtgcaacctgcacagacaactccattgggatgtacatggctttctcaaagacacctgtgttcagcacggacccaagtgtgagagcgtatgatgagaaaacgaaagggatgctcattggtgagggatcagccatgttggtgctcaaacgttatgcagatgcagtgagggatggtgatgagattcatgctgtgattcgtggttgtgcaagctcaagtgatggcaaagcagctggcatctacactcccacaatcagtggtcaagaggaagccttgagacgtgcatacaatcgtgcctgcgttgaccctgccactgtcactttggttgagggtcatgggactggcactccagttggagataggattgagttgactgcgttgaggaacttgtttgacaaagcgtatggtgaagggaacacagagaaagttgcagttggaagtatcaagtccagtattggtcatttgaaggctgttgctggtcttgctggaatgatcaaggtcatcatggctctcaaacacaagactttgcctggaacgatcaatgtggacaatccacccaatctctatgacaacactcccatcaatgagtcatccctctacatcaacacgatgaacagaccctggttccctccacctggtgttccgagacgtgctggaatatccagctttggctttggaggtgccaactaccatgcagtgttggaagaggctgaaccagagcacacgacagcgtacagactcaacaaacgtccacaaccggtgttgatgatggctgcaactcctgctgcgttgcagagcctttgtgaagctcagctgaaagagtttgaagctgcgatcaaggagaatgagacagtcaagaatactgcctacatcaagtgtgtcaagtttggagaacagttcaagttccctgggagcatacctgcgaccaatgcgagactgggattcttggtcaaagatgcggaggatgcgtgctccacgcttcgtgctatatgtgctcagtttgccaaagatgtgaccaaagaagcgtggaggcttccgagagaaggagtttctttccgtgccaaaggcattgccaccaatggtgctgttgctgcactcttctctggacaaggtgctcagtacacacacatgttcagtgaagttgcgatgaactggcctcagttcagacagtccattgctgcaatggacgctgcacagtccaaggttgctggaagtgacaaagactttgaaagagtctctcaagtcctgtacccaaggaaaccgtacgaacgtgagccagaacaagatcacaagaaaatctcactcacagcatacagccagccgtcaaccctggcatgtgctcttggtgcctttgagattttcaaggaagctggattcactccagactttgcagctggacacagcttgggtgagtttgctgcgctctatgcagctggttgtgttgacagagatgagttgtttgaacttgtttgcagaagggcaaggatcatgggaggcaaagatgcacctgccacacccaaaggttgcatggcagctgtcataggacccaacgcagagaacatcaaggttcaagctgccaacgtctggcttggaaactcaaactctccgtctcagactgtcattactgggtctgttgaagggattcaagctgaaagtgccagattgcagaaggaagggttcagagttgtgcctcttgcttgtgagtctgccttccattctccacagatggaaaatgccagctcagctttcaaagatgtcatatccaaggtttccttccgtacacccaaagcagaaacaaagctcttcagcaatgtttctggagagacctatccgacggatgccagagagatgctcactcaacacatgacctcatctgtgaagttcctgacccaagtgaggaacatgcaccaagctggtgcgagaatctttgttgagtttggaccgaaacaagttctcagcaaacttgtttctgaaaccctcaaagatgacccgtctgttgtcacagtgtctgtgaacccagcttctggcacggactctgacatacagttgagggatgctgcagttcagctggttgtggctggtgtcaatcttcaagggtttgacaagtgggatgctcctgatgccacgaggatgcaagccatcaagaaaaagagaaccacactcagactttcagctgccacctatgtcagtgacaagaccaagaaagtgagggatgctgccatgaacgacggaagatgtgtcacatacctcaagggtgctgcaccactcatcaaggctcctgaacctgtggttgacgaagctgccaagagggaggctgaaaggcttcagaaggagcttcaagacgctcagaggcagcttgacgacgccaaacgtgcagctgcagaagccaactccaaacttgctgctgccaaggaggaagccaagactgctgcagcttcagccaagcctgcagttgacactgctgttgtggagaaacatcgtgccatcctcaagtccatgctggctgagctggatggttatggaagtgttgatgcttcttcccttcagcaacagcaacagcaacagactgctccggcgcctgttaaagccgctgcccctgccgctcccgttgcaagtgctcctgctcccgccgtgtccaacgagttgcttgagaaagctgagacagttgtgatggaggttctcgctgccaagactggatacgaaacagacatgattgaggcggacatggagcttgagactgagttgggaattgacagcatcaagagggttgaaattctttctgaagtccaagctatgcttaacgttgaggcgaaagatgttgatgctctctctaggacgagaacagtgggtgaagttgtcaacgctatgaaggcagaaatcgctggttcttccgctccggcgccggcagctgccgcacctgcaccggctaaagcggctccagctgcagctgcaccagctgtttctaatgagctgctcgaaaaggcagaaactgttgtgatggaagtccttgctgccaaaactggctacgaaactgacatgatagaatcagacatggagcttgagacggagcttggaattgattccatcaagcgtgtggaaatcctcagtgaagtccaagccatgctcaatgtggaagctaaggatgtggatgctctctcaaggaccagaactgtcggtgaggttgtcaatgccatgaaggctgagatagctggaggctccgctcctgcgccggccgctgccgctcctggtcccgctgccgcggctccagctccagctgcagccgctccggccgtctcaaacgaactccttgaaaaagctgagaccgtcgtgatggaggtcttggcagctaaaaccggctatgagactgacatgattgagtctgacatggaattggagacagaacttgggatagacagcatcaaacgtgttgaaatcctcagtgaggtccaagctatgctgaacgtggaagcgaaggatgttgatgctctgtccagaacgaggaccgttggtgaggttgtggatgccatgaaggctgaaattgctggagggtctgcgcccgcgccagctgcagccgctcctgcacccgcagccgcggcacctgctccagctgcacctgcacctgccgtttcttcagaactcttggagaaggctgagacggttgtgatggaggttttggctgcaaagactggctatgagaccgacatgattgaatctgatatggaattggagacagagcttgggatcgattccatcaaaagagtggagatcctgagtgaagtccaagccatgctcaatgttgaagctaaggatgttgatgcactttcaagaacaaggacagtgggtgaggttgtggatgccatgaaggcggagattgctggagggagcgcgcctgcgccagctgccgcggcacctgcaccggcagccgcagctccagctccagctgcaccagcaccggccgcgcccgcgccagctgtttcatccgaactcctggaaaaggccgagacggttgtgatggaggtgctcgcagctaagactggttacgagaccgacatgattgaaagtgacatggagcttgaaaccgagttgggaatagatagcatcaaacgtgttgaaatcttgtctgaggtccaagctatgttgaacgtggaggcaaaagatgtcgatgcgctttcaagaaccagaacagtcggtgaggtcgtggacgccatgaaggctgaaattgccggaagctctgctagtgcgccagctgcagccgcacctgcacctgctgccgcggcacctgctccagctgcagccgctcctgccgtcagcaatgagttgctggagaaagccgaaacagttgtgatggaagtccttgctgcaaaaactggttacgaaacggacatgattgagtcagacatggaattggagaccgaacttggaatagattccatcaagagagtggagatcctctctgaggtgcaagccatgctcaacgttgaggctaaagatgttgatgcactcagtaggacaagaactgtgggggaagttgtcgatgcgatgaaggctgagattgctggaggctctgctcctgcgccggcagctgccgcacctgcacccgcagccgcggcaccagctgtcagcaacgaattgcttgagaaggctgaaacagttgtcatggaagtgctggctgcaaaaaccggctatgagactgacatgattgagtctgacatggaacttgagacggaattgggcattgacagcatcaagcgtgttgagatcctcagtgaagtccaagcaatgctcaatgtggaggctaaggatgtggatgccctctcaaggaccagaacagttggtgaggtcgttgatgcgatgaaggcggagatcgctggaagttccgcgcctgcgccagctgcagccgctcctgcacccgcagccgcggcaccggctccagctgcagccgcaccggccgtctcctcagaactcctggaaaaggctgagacagttgtgatggaagtccttgctgcgaaaactggctatgagaccgacatgattgaatctgacatggaactggagaccgagcttggaattgactccatcaaacgtgttgaaatcctctctgaggttcaagcgatgttgaatgtggaggccaaagatgttgatgctctttccagaacaaggacggtgggagaggtggttgatgccatgaaggctgagatagctgggggttctgctcctgcgccagctgcagccgctcctgctcccgctgccgcggcaccagctgtcagcaacgaactccttgaaaaagctgaaactgttgtgatggaggttttggctgcaaagactggatacgagactgacatgatagagtcagacatggagttggaaacagagcttgggattgatagcatcaagcgtgtggaaatcctttctgaggttcaagccatgctgaacgttgaggccaaagatgtcgatgctttgtcaaggaccagaacggttggagaagtggtcgatgccatgaaggctgagatagctggtggatcagcccctgctccggctgcagccgctcctgcaagtgccggtgctgcaccagctgtgaagattgattcagttcatggtgctgactgtgacgatttgtcactgatgcacgcaaaggtggttgacatcagaaggccagatgaactgattctggaaagaccggagaaccgtccagttcttgtcgttgacgatggctcagagttgacacttgctcttgtgagggtgttgggagcctgtgcagttgtcttgacctttgagggattgcagttggctcagagagctggtgcagctgccattcgtcatgttctggctaaggacctttcagcagaatcagctgagaaggccatcaaagaggctgagcaaagatttggagcgttgggaggcttcataagccagcaagcagaaaggtttgaaccagctgagatactgggtttcacactcatgtgtgcgaagtttgccaaagcctctctctgcactgctgtggctggaggtcgtcctgccttcatcggtgtggctaggcttgacggcagacttggattcacctctcaaggcacttctgacgcactcaagagagcacagcgtggagcgatctttggactctgcaagacaatagggttggagtggtcagaatctgatgtgttcagccgtggtgtggacattgctcaagggatgcacccagaagatgctgcagttgccatagttagggagatggcgtgtgctgacatcagaatcagagaggttgggattggagcaaaccagcaaagatgcacaatcagagctgccaagttggagactgggaaccctcagagacagatagcgaaagacgatgtgcttctggtttctggaggtgctcgtgggatcacacctctttgcatccgtgagatcacgcgtcagattgctggaggcaagtacattctgttgggtcgtagcaaagtttctgcgtctgaaccagcatggtgtgctggcatcactgatgagaaggctgtgcagaaagctgccacccaagagttgaagagggccttcagtgctggtgaaggacccaaacccactccaagggctgtcacgaaacttgtgggatctgttcttggtgctcgtgaagtgagaagctccattgctgccattgaagctctgggtggcaaagcgatctacagctcttgtgatgtgaactctgctgcagatgttgccaaagcagttagggatgcagagtcccagcttggtgccagagttagtggaatcgttcacgcttctggtgtgctccgtgatcgtctcatagagaagaaactccctgacgagtttgatgctgtctttgggaccaaagtcactgggttggagaatcttctggctgcagttgatcgtgccaacctcaaacacatggttctcttcagctcccttgctggtttccacggcaatgttggtcagtctgactatgcgatggcaaacgaagctctcaacaagatgggtttggaacttgcgaaggatgtcagtgtcaagtccatctgctttggtccctgggatggtgggatggtgacacctcaactcaagaaacagtttcaagaaatgggagttcagatcattcctcgtgaaggaggtgctgatacagttgcgaggattgtgttgggatcaagtcctgctgagatccttgttggaaactggaggacaccatccaagaaagttggaagtgacacgatcaccctgcatagaaagatcagtgccaagtccaatcccttcttggaggatcatgtcatacaaggcagaagggtgttgccaatgacccttgctattgggagccttgctgagacctgccttggactcttccctggctactctctctgggccatagatgacgcacagctcttcaaaggtgtcactgttgatggagacgtcaactgtgaagtgaccctcacaccgtccactgctccgagtgggagggtgaatgtccaagcgacgctcaagacgttctcaagtggaaaacttgttccagcctacagagctgtcatagtgttgtccaaccaaggtgctccacctgccaatgcaaccatgcagcctccgagccttgatgcagatcctgctttgcaagggtcagtctatgatggcaagactctctttcatggtcctgcgttcagaggcattgatgacgttctcagctgcaccaagagccagcttgttgccaagtgttctgctgttcctggatcagatgcagccagaggagagtttgcaactgacactgatgcacatgatccctttgtcaatgatcttgcctttcaagcaatgttggtctgggtgaggagaacgctgggacaagctgcactcccgaactccattcagaggatagtccaacacagaccggtcccacaagacaaacccttctacatcaccctcagatccaatcagagtggtggacatagccagcacaaacatgcacttcagttccacaacgaacaaggtgatctcttcattgatgttcaagcctctgtcattgcgacagactcacttgcgttctgagtagttagcttaatcacttaggtcacccagtccaagcccggcctagcacgatgatcatgagtgttgctattgatgtatgttaatactatacacagtcatcgtgtgtgttttataaaactgtaagcttaggatgtttgaggctaatgtaattagcactacaccgtaataaatgagaggtttactttatgttttaataatgttcttacccttgctgctctctaaactgtaatggcgtacggttagctaaactaaagtaaaaatcgattcgcttgagtaaaattagtgaccgggaaagatcatcgactactactgctcagagatgtaatcggtaattaagacttcaagctcaataattaattaggagtaaatctggcttcgaatttttaaattgtcaacttccaaagaaggattggcaagactcaatctcaattgcccaacaaacatatggctctttacaaatttggaatctctttttgatggcaagaacgtcgtaattcctctgtcgatctcatgtaattaccaaactcatctacttattactttctttatatgcacttactgatgcggccgcttaattaagatgagtgatactcaggactcaggactcactctgctgatcactagtgctagcctcgaggtcgacacccagctttcttgtacaaagtggttgcggccgcttaattaaatttaaattcaattaatgcaatcttgattttcaacaacgaaggtaatggcgtaaaagaaaaaatgtatgttattgtattgatctttcatgatgttgaagcgtgccataatatgatgatgtataattaaaatattaactgtcgcattttattgaaatggcactgttatttcaaccatatctttgattctgttacatgacacgactgcaagaagtaaataatagacgccgttgttaaagaattgctatcatatgtgcctaactagagggaatttgagcgtcagacctaatcaaatattacaaaatatctcactctgtcgccagcaatggtgtaatcagcgcagacaaatggcgtaaagatcgcggaaaaacctccccgagtggcatgatagctgcctctgtattgctgatttagtcagccttatttgacttaagggtgccctcgttagtgacaaattgctttcaaggagacagccatgccccacactttgttgaaaaacaaattgcctttggggagacggtaaagccagttgctcttcaataaggaatgtcgaggaggcaatgtaaccgcctctggtagtacacttctctaatccaaaaatcaatttgtattcaagataccgcaaaaaacttatggtttaaaccctgcaggactagtccagaaggtaattatccaagatgtagcatcaagaatccaatgtttacgggaaaaactatggaagtattatgtaagctcagcaagaagcagatcaatatgcggcacatatgcaacctatgttcaaaaatgaagaatgtacagatacaagatcctatactgccagaatacgaagaagaatacgtagaaattgaaaaagaagaaccaggcgaagaaaagaatcttgaagacgtaagcactgacgacaacaatgaaaagaagaagataaggtcggtgattgtgaaagagacatagaggacacatgtaaggtggaaaatgtaagggcggaaagtaaccttatcacaaaggaatcttatcccccactacttatccttttatatttttccgtgtcatttttgcccttgagttttcctatataaggaaccaagttcggcatttgtgaaaacaagaaaaaatttggtgtaagctattttctttgaagtactgaggatacaacttcagagaaatttgtaagtttgtaggtaccagatctggatcccaaaccatgtctccggagaggagaccagttgagattaggccagctacagcagctgatatggccgcggtttgtgatatcgttaaccattacattgagacgtctacagtgaactttaggacagagccacaaacaccacaagagtggattgatgatctagagaggttgcaagatagatacccttggttggttgctgaggttgagggtgttgtggctggtattgcttacgctgggccctggaaggctaggaacgcttacgattggacagttgagagtactgtttacgtgtcacataggcatcaaaggttgggcctaggatctacattgtacacacatttgcttaagtctatggaggcgcaaggttttaagtctgtggttgctgttataggccttccaaacgatccatctgttaggttgcatgaggctttgggatacacagcccggggtacattgcgcgcagctggatacaagcatggtggatggcatgatgttggtttttggcaaagggattttgagttgccagctcctccaaggccagttaggccagttacccaaatctgagtagttagcttaatcacctagagctcgatcggcggcaatagcttcttagcgccatcccgggttgatcctatctgtgttgaaatagttgcggtgggcaaggctctctttcagaaagacaggcggccaaaggaacccaaggtgaggtgggctatggctctcagttccttgtggaagcgcttggtctaaggtgcagaggtgttagcgggatgaagcaaaagtgtccgattgtaacaagatatgttgatcctacgtaaggatattaaagtatgtattcatcactaatataatcagtgtattccaatatgtactacgatttccaatgtctttattgtcgccgtatgtaatcggcgtcacaaaataatccccggtgactttcttttaatccaggatgaaataatatgttattataatttttgcgatttggtccgttataggaattgaagtgtgcttgaggtcggtcgccaccactcccatttcataattttacatgtatttgaaaaataaaaatttatggtattcaatttaaacacgtatacttgtaaagaatgatatcttgaaagaaatatagtttaaatatttattgataaaataacaagtcaggtattatagtccaagcaaaaacataaatttattgatgcaagtttaaattcagaaatatttcaataactgattatatcagctggtacattgccgtagatgaaagactgagtgcgatattatggtgtaatacataggaattcgtttaaacgatctgcgtctaattttcggtccaacttgcacaggaaagacgtcgaccgcggtagctcttgcccagcagactgggcttccagtcctttcgctcgatcgggtccaatgttgtcctcagctgtgaaccggaagcggacgaccaacagtggaagaactgaaaggaacgagccgtctataccttgatgatcggcctctggtgaagggtatcatcgcagccaagcaagctcatgaaaggctgatgggggaggtgtataattatgaggcccacggcgggcttattctttagggaggatctatctcgttgctcaagtgcatggcgcaaagcagttattggagtgcggattttcgttggcatattattcgccacgagttagcagacgaagagaccttcatgaacgtggccaaggccagagttaagcagatgttacgccctgctgcaggcctttctattatccaatagttggttgatctttggaaagagcctcggctgaggcccatactgaaagagatcgatggatatcgatatgccatgttgtttgctagccagaaccagatcacatccgatatgctattgcagcttgacgcagatatggaggataagttgattcatgggatcgctcaggagtagctcatccatgcacgccgacaagaacagaaattccgtcgagttaacgcagccgcttacgacggattcgaaggtcatccattcggaatgtattagtttgcaccagctccgcgtcacacctgtcttcatttgaataagatgttagcaattgtttttagctttgtcttgttgtggcagggcggcaagtgcttcagacatcattctgttttcaaattttatgctggagaacagcttcttaattcctttggaaataatagactgcgtcttaaaattcagatgtctggatatagatatgattgtaaaataacctatttaagtgtcatttagaacataagttttatgaatgttcttccattttcgtcatcgaacgaataagagtaaatacaccttttttaacattacaaataagttcttatacgttgtttatacaccgggaatcatttccattattttcgcgcaaaagtcacggatattcgtgaaagcgacataaactgcgaaatttgcggggagtgtcttgagtttgcctcgaggctagcgcatgcacatagacacacacatcatctcattgatgcttggtaataattgtcattagattgtttttatgcatagatgcactcgaaatcagccaattttagacaagtatcaaacggatgtgacttcagtacattaaaaacgtccgcaatgtgttattaagttgtctaagcgtcaatttgatttacaattgaatatatcctgccccagccagccaacagctcgatttacaattgaatatatcctgccggccggcccacgcgtgtcgaggaattctgatctggcccccatttggacgtgaatgtagacacgtcgaaataaagatttccgaattagaataatttgtttattgctttcgcctataaatacgacggatcgtaatttgtcgttttatcaaaatgtactttcattttataataacgctgcggacatctacatttttgaattgaaaaaaaattggtaattactctttctttttctccatattgaccatcatactcattgctgatccatgtagatttcccggacatgaagccatttacaattgaatatatcctgccgccgctgccgctttgcacccggtggagcttgcatgttggtttctacgcagaactgagccggttaggcagataatttccattgagaactgagccatgtgcaccttccccccaacacggtgagcgacggggcaacggagtgatccacatgggacttttaaacatcatccgtcggatggcgttgcgagagaagcagtcgatccgtgagatcagccgacgcaccgggcaggcgcgcaacacgatcgcaaagtatttgaacgcaggtacaatcgagccgacgttcacgcggaacgaccaagcaagcttggctgccatttttggggtgaggccgttcgcggccgaggggcgcagcccctggggggatgggaggcccgcgttagcgggccgggagggttcgagaagggggggcaccccccttcggcgtgcgcggtcacgcgcacagggcgcagccctggttaaaaacaaggtttataaatattggtttaaaagcaggttaaaagacaggttagcggtggccgaaaaacgggcggaaacccttgcaaatgctggattttctgcctgtggacagcccctcaaatgtcaataggtgcgcccctcatctgtcagcactctgcccctcaagtgtcaaggatcgcgcccctcatctgtcagtagtcgcgcccctcaagtgtcaataccgcagggcacttatccccaggcttgtccacatcatctgtgggaaactcgcgtaaaatcaggcgttttcgccgatttgcgaggctggccagctccacgtcgccggccgaaatcgagcctgcccctcatctgtcaacgccgcgccgggtgagtcggcccctcaagtgtcaacgtccgcccctcatctgtcagtgagggccaagttttccgcgaggtatccacaacgccggcggccgcggtgtctcgcacacggcttcgacggcgtttctggcgcgtttgcagggccatagacggccgccagcccagcggcgagggcaaccagcccggtgagcgtcggaaagggtcgacggatcttttccgctgcataaccctgcttcggggtcattatagcgattttttcggtatatccatcctttttcgcacgatatacaggattttgccaaagggttcgtgtagactttccttggtgtatccaacggcgtcagccgggcaggataggtgaagtaggcccacccgcgagcgggtgttccttcttcactgtcccttattcgcacctggcggtgctcaacgggaatcctgctctgcgaggctggccggctaccgccggcgtaacagatgagggcaagcggatggctgatgaaaccaagccaaccaggaagggcagcccacctatcaaggtgtactgccttccagacgaacgaagagcgattgaggaaaaggcggcggcggccggcatgagcctgtcggcctacctgctggccgtcggccagggctacaaaatcacgggcgtcgtggactatgagcacgtccgcgagctggcccgcatcaatggcgacctgggccgcctgggcggcctgctgaaactctggctcaccgacgacccgcgcacggcgcggttcggtgatgccacgatcctcgccctgctggcgaagatcgaagagaagcaggacgagcttggcaaggtcatgatgggcgtggtccgcccgagggcagagccatgacttttttagccgctaaaacggccggggggtgcgcgtgattgccaagcacgtccccatgcgctccatcaagaagagcgacttcgcggagctggtattcgtgcagggcaagattcggaataccaagtacgagaaggacggccagacggtctacgggaccgacttcattgccgataaggtggattatctggacaccaaggcaccaggcgggtcaaatcaggaataagggcacattgccccggcgtgagtcggggcaatcccgcaaggagggtgaatgaatcggacgtttgaccggaaggcatacaggcaagaactgatcgacgcggggttttccgccgaggatgccgaaaccatcgcaagccgcaccgtcatgcgtgcgccccgcgaaaccttccagtccgtcggctcgatggtccagcaagctacggccaagatcgagcgcgacagcgtgcaactggctccccctgccctgcccgcgccatcggccgccgtggagcgttcgcgtcgtctcgaacaggaggcggcaggtttggcgaagtcgatgaccatcgacacgcgaggaactatgacgaccaagaagcgaaaaaccgccggcgaggacctggcaaaacaggtcagcgaggccaagcaggccgcgttgctgaaacacacgaagcagcagatcaaggaaatgcagctttccttgttcgatattgcgccgtggccggacacgatgcgagcgatgccaaacgacacggcccgctctgccctgttcaccacgcgcaacaagaaaatcccgcgcgaggcgctgcaaaacaaggtcattttccacgtcaacaaggacgtgaagatcacctacaccggcgtcgagctgcgggccgacgatgacgaactggtgtggcagcaggtgttggagtacgcgaagcgcacccctatcggcgagccgatcaccttcacgttctacgagctttgccaggacctgggctggtcgatcaatggccggtattacacgaaggccgaggaatgcctgtcgcgcctacaggcgacggcgatgggcttcacgtccgaccgcgttgggcacctggaatcggtgtcgctgctgcaccgcttccgcgtcctggaccgtggcaagaaaacgtcccgttgccaggtcctgatcgacgaggaaatcgtcgtgctgtttgctggcgaccactacacgaaattcatatgggagaagtaccgcaagctgtcgccgacggcccgacggatgttcgactatttcagctcgcaccgggagccgtacccgctcaagctggaaaccttccgcctcatgtgcggatcggattccacccgcgtgaagaagtggcgcgagcaggtcggcgaagcctgcgaagagttgcgaggcagcggcctggtggaacacgcctgggtcaatgatgacctggtgcattgcaaacgctagggccttgtggggtcagttccggctgggggttcagcagccagcgctttactggcatttcaggaacaagcgggcactgctcgacgcacttgcttcgctcagtatcgctcgggacgcacggcgcgctctacgaactgccgataaacagaggattaaaattgacaattgtgattaaggctcagattcgacggcttggagcggccgacgtgcaggatttccgcgagatccgattgtcggccctgaagaaagctccagagatgttcgggtccgtttacgagcacgaggagaaaaagcccatggaggcgttcgctgaacggttgcgagatgccgtggcattcggcgcctacatcgacggcgagatcattgggctgtcggtcttcaaacaggaggacggccccaaggacgctcacaaggcgcatctgtccggcgttttcgtggagcccgaacagcgaggccgaggggtcgccggtatgctgctgcgggcgttgccggcgggtttattgctcgtgatgatcgtccgacagattccaacgggaatctggtggatgcgcatcttcatcctcggcgcacttaatatttcgctattctggagcttgttgtttatttcggtctaccgcctgccgggcggggtcgcggcgacggtaggcgctgtgcagccgctgatggtcgtgttcatctctgccgctctgctaggtagcccgatacgattgatggcggtcctgggggctatttgcggaactgcgggcgtggcgctgttggtgttgacaccaaacgcagcgctagatcctgtcggcgtcgcagcgggcctggcgggggcggtttccatggcgttcggaaccgtgctgacccgcaagtggcaacctcccgtgcctctgctcacctttaccgcctggcaactggcggccggaggacttctgctcgttccagtagctttagtgtttgatccgccaatcccgatgcctacaggaaccaatgttctcggcctggcgtggctcggcctgatcggagcgggtttaacctacttcctttggttccgggggatctcgcgactcgaacctacagttgtttccttactgggctttctcagcccccgagcgcttagtgggaatttgtaccccttatcgaaccgggagcacaggatgacgcctaacaattcattcaagccgacaccgcttcgcggcgcggcttaattcaggagttaaacatcatgagggaagcggtgatcgccgaagtatcgactcaactatcagaggtagttggcgtcatcgagcgccatctcgaaccgacgttgctggccgtacatttgtacggctccgcagtggatggcggcctgaagccacacagtgatattgatttgctggttacggtgaccgtaaggcttgatgaaacaacgcggcgagctttgatcaacgaccttttggaaacttcggcttcccctggagagagcgagattctccgcgctgtagaagtcaccattgttgtgcacgacgacatcattccgtggcgttatccagctaagcgcgaactgcaatttggagaatggcagcgcaatgacattcttgcaggtatcttcgagccagccacgatcgacattgatctggctatcttgctgacaaaagcaagagaacatagcgttgccttggtaggtccagcggcggaggaactctttgatccggttcctgaacaggatctatttgaggcgctaaatgaaaccttaacgctatggaactcgccgcccgactgggctggcgatgagcgaaatgtagtgcttacgttgtcccgcatttggtacagcgcagtaaccggcaaaatcgcgccgaaggatgtcgctgccgactgggcaatggagcgcctgccggcccagtatcagcccgtcatacttgaagctaggcaggcttatcttggacaagaagatcgcttggcctcgcgcgcagatcagttggaagaatttgttcactacgtgaaaggcgagatcaccaaggtagtcggcaaataatgtctaacaattcgttcaagccgacgccgcttcgcggcgcggcttaactcaagcgttagagagctggggaagactatgcgcgatctgttgaaggtggttctaagcctcgtcttgcgatggcatttcgatccattcccattccgcgctcaagatggcttcccctcggcagttcatcagggctaaatcaatctagccgacttgtccggtgaaatgggctgcactccaacagaaacaatcaaacaaacatacacagcgacttattcacacgagctca

SEQ ID NO: 58 - DNA, 38074 bp, Artificial sequence
  plasmid pDAB108207
aattacaacggtatatatcctgccagtcagcatcatcacaccaaaagttaggcccgaatagtttgaaattagaaagctcgcaattgaggtctacaggccaaattcgctcttagccgtacaatattactcaccggatcctaaccggtttaattaaggcgcgccatgcccgggcaagcggccgcacaagtttgtacaaaaaagcaggcttctagacctaggtggagtcatcacgcagactatctcagcatgtgcgtagcacgcggccgcagcttatagtaaagatttttttgttaataaaatgaaagttaatatttatggatttatttgaacatatttacaagtttttgttaataaatttatttacagaagtgttaaatttgaaaatgtgttaaatgagagttaatatttatggatataatattactttatttaaaaataaaatgaatttatattaaaatatgatttggtaaaagatattataaagaggaacttggatgagaaagacgacgatgggcaaaagttgcatggcacaccgcttttgttcagtaacatctgcactgtggcgcctttttcacactcaccatgcatgctgccacgtcagctttcacactatgacaccactggccatacacgttgccacctcagctttctcctcttctcactatgacacgactggccatgcatgcatgcatgctgccacctcagctcccgcctcttcacccgtgtctttctctcatgtcgcagtgctgcgtgccaacctcttctctctataaatagagagaagagaatgatggttaaactcaaaccaaaacaagaaaacatacacaaatagcaaaacggatccacaaccaaaaatggcagcgaggctgcaagagcagaaaggaggtgagatggacacgaggattgcgatcataggcatgagcgccatacttccttgtggaaccacggtgagagagtcatgggagaccataagggctggcattgattgcctgtctgatcttcctgaggatcgtgttgatgtgactgcgtactttgacccagtcaagaccacaaaggacaaaatctactgcaagagaggaggtttcattcctgagtatgactttgatgcgcgtgagtttggtctcaacatgttccagatggaagattctgatgcgaatcagaccatctcacttctcaaggtcaaagaagcacttcaagatgctgggattgatgcacttggaaaggagaagaaaaacataggatgcgtgcttggcattggaggtggacagaagagttcacatgagttctacagcagactcaactatgtggttgtggagaaagtcttgagaaagatggggatgccagaggaagatgtcaaagtggctgtggagaagtacaaagcgaacttcccagaatggagacttgactctttccctggattccttgggaatgtcactgctggcagatgcaccaacacattcaacttggatggcatgaactgcgttgtggatgctgcatgtgcaagctccttgatagcagtcaaggttgcgattgatgaactgctctatggtgactgcgacatgatggtcactggtgcaacctgcacagacaactccattgggatgtacatggctttctcaaagacacctgtgttcagcacggacccaagtgtgagagcgtatgatgagaaaacgaaagggatgctcattggtgagggatcagccatgttggtgctcaaacgttatgcagatgcagtgagggatggtgatgagattcatgctgtgattcgtggttgtgcaagctcaagtgatggcaaagcagctggcatctacactcccacaatcagtggtcaagaggaagccttgagacgtgcatacaatcgtgcctgcgttgaccctgccactgtcactttggttgagggtcatgggactggcactccagttggagataggattgagttgactgcgttgaggaacttgtttgacaaagcgtatggtgaagggaacacagagaaagttgcagttggaagtatcaagtccagtattggtcatttgaaggctgttgctggtcttgctggaatgatcaaggtcatcatggctctcaaacacaagactttgcctggaacgatcaatgtggacaatccacccaatctctatgacaacactcccatcaatgagtcatccctctacatcaacacgatgaacagaccctggttccctccacctggtgttccgagacgtgctggaatatccagctttggctttggaggtgccaactaccatgcagtgttggaagaggctgaaccagagcacacgacagcgtacagactcaacaaacgtccacaaccggtgttgatgatggctgcaactcctgctgcgttgcagagcctttgtgaagctcagctgaaagagtttgaagctgcgatcaaggagaatgagacagtcaagaatactgcctacatcaagtgtgtcaagtttggagaacagttcaagttccctgggagcatacctgcgaccaatgcgagactgggattcttggtcaaagatgcggaggatgcgtgctccacgcttcgtgctatatgtgctcagtttgccaaagatgtgaccaaagaagcgtggaggcttccgagagaaggagtttctttccgtgccaaaggcattgccaccaatggtgctgttgctgcactcttctctggacaaggtgctcagtacacacacatgttcagtgaagttgcgatgaactggcctcagttcagacagtccattgctgcaatggacgctgcacagtccaaggttgctggaagtgacaaagactttgaaagagtctctcaagtcctgtacccaaggaaaccgtacgaacgtgagccagaacaagatcacaagaaaatctcactcacagcatacagccagccgtcaaccctggcatgtgctcttggtgcctttgagattttcaaggaagctggattcactccagactttgcagctggacacagcttgggtgagtttgctgcgctctatgcagctggttgtgttgacagagatgagttgtttgaacttgtttgcagaagggcaaggatcatgggaggcaaagatgcacctgccacacccaaaggttgcatggcagctgtcataggacccaacgcagagaacatcaaggttcaagctgccaacgtctggcttggaaactcaaactctccgtctcagactgtcattactgggtctgttgaagggattcaagctgaaagtgccagattgcagaaggaagggttcagagttgtgcctcttgcttgtgagtctgccttccattctccacagatggaaaatgccagctcagctttcaaagatgtcatatccaaggtttccttccgtacacccaaagcagaaacaaagctcttcagcaatgtttctggagagacctatccgacggatgccagagagatgctcactcaacacatgacctcatctgtgaagttcctgacccaagtgaggaacatgcaccaagctggtgcgagaatctttgttgagtttggaccgaaacaagttctcagcaaacttgtttctgaaaccctcaaagatgacccgtctgttgtcacagtgtctgtgaacccagcttctggcacggactctgacatacagttgagggatgctgcagttcagctggttgtggctggtgtcaatcttcaagggtttgacaagtgggatgctcctgatgccacgaggatgcaagccatcaagaaaaagagaaccacactcagactttcagctgccacctatgtcagtgacaagaccaagaaagtgagggatgctgccatgaacgacggaagatgtgtcacatacctcaagggtgctgcaccactcatcaaggctcctgaacctgtggttgacgaagctgccaagagggaggctgaaaggcttcagaaggagcttcaagacgctcagaggcagcttgacgacgccaaacgtgcagctgcagaagccaactccaaacttgctgctgccaaggaggaagccaagactgctgcagcttcagccaagcctgcagttgacactgctgttgtggagaaacatcgtgccatcctcaagtccatgctggctgagctggatggttatggaagtgttgatgcttcttcccttcagcaacagcaacagcaacagactgctccggcgcctgttaaagccgctgcccctgccgctcccgttgcaagtgctcctgctcccgccgtgtccaacgagttgcttgagaaagctgagacagttgtgatggaggttctcgctgccaagactggatacgaaacagacatgattgaggcggacatggagcttgagactgagttgggaattgacagcatcaagagggttgaaattctttctgaagtccaagctatgcttaacgttgaggcgaaagatgttgatgctctctctaggacgagaacagtgggtgaagttgtcaacgctatgaaggcagaaatcgctggttcttccgctccggcgccggcagctgccgcacctgcaccggctaaagcggctccagctgcagctgcaccagctgtttctaatgagctgctcgaaaaggcagaaactgttgtgatggaagtccttgctgccaaaactggctacgaaactgacatgatagaatcagacatggagcttgagacggagcttggaattgattccatcaagcgtgtggaaatcctcagtgaagtccaagccatgctcaatgtggaagctaaggatgtggatgctctctcaaggaccagaactgtcggtgaggttgtcaatgccatgaaggctgagatagctggaggctccgctcctgcgccggccgctgccgctcctggtcccgctgccgcggctccagctccagctgcagccgctccggccgtctcaaacgaactccttgaaaaagctgagaccgtcgtgatggaggtcttggcagctaaaaccggctatgagactgacatgattgagtctgacatggaattggagacagaacttgggatagacagcatcaaacgtgttgaaatcctcagtgaggtccaagctatgctgaacgtggaagcgaaggatgttgatgctctgtccagaacgaggaccgttggtgaggttgtggatgccatgaaggctgaaattgctggagggtctgcgcccgcgccagctgcagccgctcctgcacccgcagccgcggcacctgctccagctgcacctgcacctgccgtttcttcagaactcttggagaaggctgagacggttgtgatggaggttttggctgcaaagactggctatgagaccgacatgattgaatctgatatggaattggagacagagcttgggatcgattccatcaaaagagtggagatcctgagtgaagtccaagccatgctcaatgttgaagctaaggatgttgatgcactttcaagaacaaggacagtgggtgaggttgtggatgccatgaaggcggagattgctggagggagcgcgcctgcgccagctgccgcggcacctgcaccggcagccgcagctccagctccagctgcaccagcaccggccgcgcccgcgccagctgtttcatccgaactcctggaaaaggccgagacggttgtgatggaggtgctcgcagctaagactggttacgagaccgacatgattgaaagtgacatggagcttgaaaccgagttgggaatagatagcatcaaacgtgttgaaatcttgtctgaggtccaagctatgttgaacgtggaggcaaaagatgtcgatgcgctttcaagaaccagaacagtcggtgaggtcgtggacgccatgaaggctgaaattgccggaagctctgctagtgcgccagctgcagccgcacctgcacctgctgccgcggcacctgctccagctgcagccgctcctgccgtcagcaatgagttgctggagaaagccgaaacagttgtgatggaagtccttgctgcaaaaactggttacgaaacggacatgattgagtcagacatggaattggagaccgaacttggaatagattccatcaagagagtggagatcctctctgaggtgcaagccatgctcaacgttgaggctaaagatgttgatgcactcagtaggacaagaactgtgggggaagttgtcgatgcgatgaaggctgagattgctggaggctctgctcctgcgccggcagctgccgcacctgcacccgcagccgcggcaccagctgtcagcaacgaattgcttgagaaggctgaaacagttgtcatggaagtgctggctgcaaaaaccggctatgagactgacatgattgagtctgacatggaacttgagacggaattgggcattgacagcatcaagcgtgttgagatcctcagtgaagtccaagcaatgctcaatgtggaggctaaggatgtggatgccctctcaaggaccagaacagttggtgaggtcgttgatgcgatgaaggcggagatcgctggaagttccgcgcctgcgccagctgcagccgctcctgcacccgcagccgcggcaccggctccagctgcagccgcaccggccgtctcctcagaactcctggaaaaggctgagacagttgtgatggaagtccttgctgcgaaaactggctatgagaccgacatgattgaatctgacatggaactggagaccgagcttggaattgactccatcaaacgtgttgaaatcctctctgaggttcaagcgatgttgaatgtggaggccaaagatgttgatgctctttccagaacaaggacggtgggagaggtggttgatgccatgaaggctgagatagctgggggttctgctcctgcgccagctgcagccgctcctgctcccgctgccgcggcaccagctgtcagcaacgaactccttgaaaaagctgaaactgttgtgatggaggttttggctgcaaagactggatacgagactgacatgatagagtcagacatggagttggaaacagagcttgggattgatagcatcaagcgtgtggaaatcctttctgaggttcaagccatgctgaacgttgaggccaaagatgtcgatgctttgtcaaggaccagaacggttggagaagtggtcgatgccatgaaggctgagatagctggtggatcagcccctgctccggctgcagccgctcctgcaagtgccggtgctgcaccagctgtgaagattgattcagttcatggtgctgactgtgacgatttgtcactgatgcacgcaaaggtggttgacatcagaaggccagatgaactgattctggaaagaccggagaaccgtccagttcttgtcgttgacgatggctcagagttgacacttgctcttgtgagggtgttgggagcctgtgcagttgtcttgacctttgagggattgcagttggctcagagagctggtgcagctgccattcgtcatgttctggctaaggacctttcagcagaatcagctgagaaggccatcaaagaggctgagcaaagatttggagcgttgggaggcttcataagccagcaagcagaaaggtttgaaccagctgagatactgggtttcacactcatgtgtgcgaagtttgccaaagcctctctctgcactgctgtggctggaggtcgtcctgccttcatcggtgtggctaggcttgacggcagacttggattcacctctcaaggcacttctgacgcactcaagagagcacagcgtggagcgatctttggactctgcaagacaatagggttggagtggtcagaatctgatgtgttcagccgtggtgtggacattgctcaagggatgcacccagaagatgctgcagttgccatagttagggagatggcgtgtgctgacatcagaatcagagaggttgggattggagcaaaccagcaaagatgcacaatcagagctgccaagttggagactgggaaccctcagagacagatagcgaaagacgatgtgcttctggtttctggaggtgctcgtgggatcacacctctttgcatccgtgagatcacgcgtcagattgctggaggcaagtacattctgttgggtcgtagcaaagtttctgcgtctgaaccagcatggtgtgctggcatcactgatgagaaggctgtgcagaaagctgccacccaagagttgaagagggccttcagtgctggtgaaggacccaaacccactccaagggctgtcacgaaacttgtgggatctgttcttggtgctcgtgaagtgagaagctccattgctgccattgaagctctgggtggcaaagcgatctacagctcttgtgatgtgaactctgctgcagatgttgccaaagcagttagggatgcagagtcccagcttggtgccagagttagtggaatcgttcacgcttctggtgtgctccgtgatcgtctcatagagaagaaactccctgacgagtttgatgctgtctttgggaccaaagtcactgggttggagaatcttctggctgcagttgatcgtgccaacctcaaacacatggttctcttcagctcccttgctggtttccacggcaatgttggtcagtctgactatgcgatggcaaacgaagctctcaacaagatgggtttggaacttgcgaaggatgtcagtgtcaagtccatctgctttggtccctgggatggtgggatggtgacacctcaactcaagaaacagtttcaagaaatgggagttcagatcattcctcgtgaaggaggtgctgatacagttgcgaggattgtgttgggatcaagtcctgctgagatccttgttggaaactggaggacaccatccaagaaagttggaagtgacacgatcaccctgcatagaaagatcagtgccaagtccaatcccttcttggaggatcatgtcatacaaggcagaagggtgttgccaatgacccttgctattgggagccttgctgagacctgccttggactcttccctggctactctctctgggccatagatgacgcacagctcttcaaaggtgtcactgttgatggagacgtcaactgtgaagtgaccctcacaccgtccactgctccgagtgggagggtgaatgtccaagcgacgctcaagacgttctcaagtggaaaacttgttccagcctacagagctgtcatagtgttgtccaaccaaggtgctccacctgccaatgcaaccatgcagcctccgagccttgatgcagatcctgctttgcaagggtcagtctatgatggcaagactctctttcatggtcctgcgttcagaggcattgatgacgttctcagctgcaccaagagccagcttgttgccaagtgttctgctgttcctggatcagatgcagccagaggagagtttgcaactgacactgatgcacatgatccctttgtcaatgatcttgcctttcaagcaatgttggtctgggtgaggagaacgctgggacaagctgcactcccgaactccattcagaggatagtccaacacagaccggtcccacaagacaaacccttctacatcaccctcagatccaatcagagtggtggacatagccagcacaaacatgcacttcagttccacaacgaacaaggtgatctcttcattgatgttcaagcctctgtcattgcgacagactcacttgcgttctgagtagttagcttaatcacttaggtcacccagtccaagcccggcctagcacgatgatcatgagtgttgctattgatgtatgttaatactatacacagtcatcgtgtgtgttttataaaactgtaagcttaggatgtttgaggctaatgtaattagcactacaccgtaataaatgagaggtttactttatgttttaataatgttcttacccttgctgctctctaaactgtaatggcgtacggttagctaaactaaagtaaaaatcgattcgcttgagtaaaattagtgaccgggaaagatcatcgactactactgctcagagatgtaatcggtaattaagacttcaagctcaataattaattaggagtaaatctggcttcgaatttttaaattgtcaacttccaaagaaggattggcaagactcaatctcaattgcccaacaaacatatggctctttacaaatttggaatctctttttgatggcaagaacgtcgtaattcctctgtcgatctcatgtaattaccaaactcatctacttattactttctttatatgcacttactgatgcggccgcttaattaagatgagtgatactcaggactcaggactcactctgctgatcactagtgctagcctcgaggtcgacacaactttgtatacaaaagttgtctagacctaggctcagcaactcatccagtcaagttcgagtcagtgagttgggcggccgcgaattcggcgcgccaaccttggactcccatgttggcaaaggcaaccaaacaaacaatgaatgatccgctcctgcatatggggcggtttgagtatttcaactgccatttgggctgaattgaagacatgctcctgtcagaaattccgtgatcttactcaatattcagtaatctcggccaatatcctaaatgtgcgtggctttatctgtctttgtattgtttcatcaattcatgtaacgtttgcttttcttatgaattttcaaataaattatcgatagtactacgaatatttcgtatcgctgatcttctcaatcacaatgatgcgtagtgacccgacaaataatttaagcgtccttaataccaatcctaaaataattgaggcaaataaaatttttttgtaatttttatgatagcagatcgattctccagcaagcctgcaacaaaatattgtgtatttctaaatagattttgatactcgaggtgaccgaattcgttggtagggtgctaggaaacttgtttttggggttttgtataagggttgaaacatccctgaagtgtctcattttattttatttattctttgctgataaaaaaataaaataaaagaagctaagcacacggtcaaccattgctctactgctaaaagggttatgtgtagtgttttactgcataaattatgcagcaaacaagacaactcaaattaaaaaatttcctttgcttgtttttttgttgtctctgacttgactttcttgtggaagttggttgtataaggattgggacaccattgtccttcttaatttaattttattctttgctgataaaaaaaaaaaatttcatatagtgttaaataataatttgttaaataaccaaaaagtcaaatatgtttactctcgtttaaataattgagattcgttccagcaaggctaaacgattgtatagatttatgacaatatttacttttttatagataaatgttatattataataaatttatatacatatattatatgttatttattatttattattattttaaatccttcaatattttatcaaaccaactcataattttttttttatctgtaagaagcaataaaattaaatagacccactttaaggatgatccaacctttatacagagtaagagagttcaaatagtaccttttcatatacatatcaactaaaatattagaaatatcatggatcaaaccttataaagacattaaataagtggataagtataatatataaatgggtagtatataatatataaatggatacaaacttctctctttataattgttatgtctccttaacatcctaatataatacataagtgggtaatatataatatataaatggagacaaacttcttccattataattgttatgtcttcttaacacttatgtctcgttcacaatgctaaagttagaattgtttagaaagtcttatagtacacatttgtttttgtactatttgaagcattccataagccgtcacgattcagatgatttataataataagaggaaatttatcatagaacaataaggtgcatagatagagtgttaatatatcataacatcctttgtttattcatagaagaagtgagatggagctcagttattatactgttacatggtcggatacaatattccatgctctccatgagctcttacacctacatgcattttagttcatactggtgacctaagtgattaagctaactactcagtaatgccagaacttgggctgccaaccaaaacccgcaacagccacagctgcaacacaattgtcatctggcacaagctccaacagagaccacgcaggagctgtttggagcttggcaggttctgttggggtgagtgctatctcgatctcttcaagtttggctattccatctcccgttgctttgagataagcctctttgcaagtccagtaacgaaagaaaatcttctgtttctgctcatcagggagtgacctcaagagttcatattctcttgggagaaagaacctctttgcaagagactccaagtcagatgttggacgcagatattcaagatcaatgcctatttgacgcgtgtagttgacagcacacaaggcaaggttctggctgtgagacaagttgaacaggagtccactctcagcaaatctgtcaccaaggatcggtttcccacgggactcataatcaaacttgacttgacccggttccactcccaagtatccacccaagatggatctgaggatgcctctcccagcagtgaaacgccttctgtgttctggaaagtagaatctgtttgccctcgccaattcatcactgctcagggtggcagcaaggtcttgaagttgtgactcaggctggtcaagaggaatcctccagagatgaacctcatctgacaagagggtcagattgggaggcttcggaagccaagtgtgctgaagcatttttggttgtggatcctagagtagtattgaatatgagttgggttggggtattatagtagtagagtagtagtactctggatggatggatgatgaaagaagtgagtgatattagaggtatttataggtattatataagagagaaggtggttggaacatgcatggagatttgggcatgggatgacacgcatatgcaggttgacgtgtgttgaagtgaagaaattgaggtggcggaagagaatgaatatatacaggtggttgtggtgatgatgaagaaaaaggcaatgtgtttgtgtgtgggttgagatgggtgagccatttaaagtgcatgttaagcacgtgttgctttgcatggcatttagacatacatggacgcggcgatcttgatcagccagtgactaatttgagttggttgtgtgattgcgttttgtctctctgttttgtcttttttctttgttctttgtctttttcttgcgcaagatccatgcatgaaccaaaagaccacagagtgtcatggcaacccacagtaattccagttacggacttacataccaagaaaaggtaaaagcaataagaaatatatgaaaattagtccaccataaatcttatagtttatggtttagggtaacactctaacactctactacattacttatatttactttaaactatctataaaacaatttaaacatagtagaataataaatcaatagtcacaaattcaacaattaaacttaaaattaaaaaagtaatattttaattatatctaattaattttttagaagtaatattgagtatttgatatatgaaatcttgaatatagtaactattattaaaattactttagaagatgtgtctcgcatgtaaaagcagatctaatctgacctgaccactagacctgagtgagtacagatgtgctactagtgctagcctcgaggtcgaccaacttttctatacaaagttgtctagacctaggactaggcactgagtgactcactgacctgactgagtgactggcggccgcagcttatagtaaagatttttttgttaataaaatgaaagttaatatttatggatttatttgaacatatttacaagtttttgttaataaatttatttacagaagtgttaaatttgaaaatgtgttaaatgagagttaatatttatggatataatattactttatttaaaaataaaatgaatttatattaaaatatgatttggtaaaagatattataaagaggaacttggatgagaaagacgacgatgggcaaaagttgcatggcacaccgcttttgttcagtaacatctgcactgtggcgcctttttcacactcaccatgcatgctgccacgtcagctttcacactatgacaccactggccatacacgttgccacctcagctttctcctcttctcactatgacacgactggccatgcatgcatgcatgctgccacctcagctcccgcctcttcacccgtgtctttctctcatgtcgcagtgctgcgtgccaacctcttctctctataaatagagagaagagaatgatggttaaactcaaaccaaaacaagaaaacatacacaaatagcaaaacggatccacaaccaaaaatggcgcttcgtgtcaagaccaacaagaagccatgttgggagatgaccaaggaggaactgacctctggcaaaactgaggtgttcaactatgaggaactcctggagtttgcagagggtgacatagctaaggtttttggtccggagtttgctgtcatagacaagtaccccagaagggtgaggctgcctgctcgtgaatacctgcttgtgacaagggtcacactcatggatgccgaggtcaacaactacagagttggtgccagaatggtcactgagtatgatcttccagtgaatggcgaattgtctgagggaggtgattgtccctgggcagttctggttgagagtggacagtgcgatttgatgctgatatcatacatgggaattgatttccagaaccaaggtgacagagtttaccgtctgctcaacaccacgttgacattctatggggttgcccatgagggagagacccttgagtatgacatcagagtgaccggttttgccaaacgtttggatggtggcatctccatgttcttctttgagtatgactgctatgtcaatgggaggcttctcattgagatgagagatggctgtgctggcttcttcacaaatgaggagcttgatgcgggaaagggtgtggtgttcacaagaggggatttggctgccagagctaagattccaaagcaagatgtttctccctatgctgtcgctccctgccttcacaaaacaaaactcaacgaaaaggagatgcagaccttggttgacaaagattgggcttccgtttttggctcaaagaatggcatgccggagatcaactacaaactctgcgcacgtaagatgctcatgattgatagagtcaccagcattgaccataagggaggtgtgtacggtttgggtcagttggttggtgagaaaatcttggagagggaccattggtacttcccatgccattttgttaaggatcaagtcatggctggatctcttgtcagcgacggttgttcacaaatgctcaagatgtacatgatctggctcggtttgcaccttaccaccggaccatttgacttcagacccgtcaacggacacccgaacaaagttaggtgtaggggtcagatatctcctcataagggaaagttggtctacgtcatggagatcaaagagatgggattcgacgaggataacgatccgtacgccattgctgacgtcaacatcattgacgttgatttcgaaaagggtcaagatttcagccttgatagaatcagcgactacggaaagggggatcttaacaaaaagatcgtcgtggacttcaagggcattgctctcaagatgcagaagagatccacgaacaagaacccctccaaagttcagcccgtttttgctaacggtgcagccactgtgggaccggaagcgtccaaggccagctctggtgccagtgctagtgcttctgctgcccctgcgaagcctgctttctcagcagatgttcttgcgccaaagccagttgcacttcctgaacatatcctcaagggtgacgctctcgctccgaaagaaatgtcctggcatcccatgtcaaaacttcctggcaacccgacgccgttcttctcccctagttcttaccctccgagggcaatttgcttcatccctttccctggcaacccacttgacaacaattgcaaagctggagaaatgcctctgaactggtacaacatgtcagagttcatgtgtggaaaagttagcaactgcttgggaccagagttcgcaagatttgataagtcaaatacgagcagaagccctgcttttgatttggctcttgtgactagagttgttgaagtcacaaacatggaacatggcaagttcctgaatgttgattgcaatcccagcaaaggcacaatggtgggggagtttgactgtcctcaagatgcgtggttctttgatggttcttgcaatgatgggcacatgccttattccatcatcatggaaatcggacttcagacatccggtgttctcaccagtgtgttgaaagcaccactgacgatggacaaagatgacattctctttaggaaccttgatgcaagtgctgaaatggtgaggccagatgtggatgtgagggggaaaaccataaggaatgtgaccaagtgcactggatatgcaatgttgggaaagatggggattcacagattcacgtttgagttgtctgttgatggcgtggttttctacaaaggaagcacttcctttggatggttcactccagaggtgtttgctcagcaagctggacttgacaatgggaaaaagacggagccttggtgcaaaactaacaacacgagtgtgagaagagttgaaatcgcatcagccaaaggcaaagaacagctgactgagaaacttccagatgcaactaatgctcaagttctcagaaggtcagaacagtgtgagtatttggattacctcaacattgctcctgattctgggctgcatgggaaaggatatgcgcatggacacaaagatgttaacccacaagactggttcttctcttgtcacttttggtttgatcctgtgatgcctggatctttgggaattgagtcaatgttccagctcattgaggcatttgcggtggaccagaacataccgggagaatacaatgtgagcaatccgacctttgcccatgcccctggaaaaacggcgtggaagtaccgtggtcaattgacaccaaagaaccgtgcgatggactgtgaggtgcacatagtttcaatcacagcctctcctgaaaatggaggctacgttgacatagtggcagatggagcactttgggttgatggtctccgtgtgtatgaagccaaagaactcagagttcgtgttgtcagtgcaaaacctcaagccattccggatgttcaacaacagccacccagcgcaaaagcggaccctgggaaaactggagttgcactcagtccgactcagttgagagatgtcctgcttgaagtggacaatccattgtatcttggtgttgaaaactccaatttggtgcagtttgaatccaaacctgcaacttcttcaaggattgtcagtatcaaaccatgctccataagtgatcttggtgacaagtccttcatggaaacgtacaatgtgtcagcacctctgtacactggagcaatggccaagggaattgcgtctgcggaccttgtcattgctgctgggaagaggaagatattgggttcttttggagcgggtgggcttccaatgcaccatgtgagggcagctttggagaagatacaagcggctctgcctcaaggaccatatgctgtgaacctcattcattcaccttttgacagcaacttggaaaaggggaatgttgatctcttcctcgaaaagggcgttactgtggtggaggcttctgcattcatgaccctcactccccaagttgttcgttaccgtgcagccggactctcaaggaacgctgatgggagtgtcaacatcagaaaccgtatcattggaaaagtgtccagaacagaactcgccgaaatgttcatcagaccggctccggaacacctccttgagaaactcatagcttctggtgagataacacaagaacaagccgaacttgcccgtcgtgttcctgtcgcagacgacatcgctgttgaagctgattctggtggtcacactgacaaccgtcccatccacgtcatcttgcctttgatcatcaaccttaggaacagactgcacagagagtgtggttatcctgcgcaccttagagtcagagttggagctggaggcggtgttggctgcccacaagctgctgcggctgccctcacaatgggagctgccttcatagtgactgggactgtcaatcaagttgctaaacagtccgggacatgtgacaacgtgagaaaacaactcagtcaagccacctacagtgacatttgcatggctccagcagctgatatgtttgaggaaggtgtgaaactccaagttctcaagaagggaacaatgttcccatcaagagctaacaaattgtacgaactcttttgcaagtacgactctttcgattcaatgcctcctgctgaacttgaaaggatcgagaagaggatcttcaagagggcacttcaagaggtctgggaagagaccaaggacttttacatcaatggtttgaagaatccagagaagatacagagagcggaacatgaccccaaactcaagatgtctttgtgtttcagatggtatcttggtcttgcatcacgttgggccaacatgggtgctcctgatcgtgtcatggactatcaagtctggtgtggtccagccattggagccttcaatgacttcatcaaaggaacatatcttgatcctgctgtctctaatgagtacccatgtgttgtccagatcaaccttcagattttgcgtggtgcatgttacctgaggcgtcttaatgctctgagaaatgatccgaggattgatcttgagactgaagatgctgcctttgtctatgagccaacgaatgcgctttgagtagttagcttaatcacttaggtcacccagtccaagcccggcctagcacgatgatcatgagtgttgctattgatgtatgttaatactatacacagtcatcgtgtgtgttttataaaactgtaagcttaggatgtttgaggctaatgtaattagcactacaccgtaataaatgagaggtttactttatgttttaataatgttcttacccttgctgctctctaaactgtaatggcgtacggttagctaaactaaagtaaaaatcgattcgcttgagtaaaattagtgaccgggaaagatcatcgactactactgctcagagatgtaatcggtaattaagacttcaagctcaataattaattaggagtaaatctggcttcgaatttttaaattgtcaacttccaaagaaggattggcaagactcaatctcaattgcccaacaaacatatggctctttacaaatttggaatctctttttgatggcaagaacgtcgtaattcctctgtcgatctcatgtaattaccaaactcatctacttattactttctttatatgcacttactgatgcggccgcttaattaatcacgagtggatgactgtcacgactgactcatgactgactactagtagcacatctgtactcactcaggtctagtggtcaggtcagattaattaagcggccgcgaattcggcgcgccaaccttggactcccatgttggcaaaggcaaccaaacaaacaatgaatgatccgctcctgcatatggggcggtttgagtatttcaactgccatttgggctgaattgaagacatgctcctgtcagaaattccgtgatcttactcaatattcagtaatctcggccaatatcctaaatgtgcgtggctttatctgtctttgtattgtttcatcaattcatgtaacgtttgcttttcttatgaattttcaaataaattatcgatagtactacgaatatttcgtatcgctgatcttctcaatcacaatgatgcgtagtgacccgacaaataatttaagcgtccttaataccaatcctaaaataattgaggcaaataaaatttttttgtaatttttatgatagcagatcgattctccagcaagcctgcaacaaaatattgtgtatttctaaatagattttgatactcgaggtcgacacaactttgtataataaagttgtctagacctagtagcacatctgtactcactcaggtctagtggtcaggtcagattaattaagcggccgcgaattcgttggtagggtgctaggaaacttgtttttggggttttgtataagggttgaaacatccctgaagtgtctcattttattttatttattctttgctgataaaaaaataaaataaaagaagctaagcacacggtcaaccattgctctactgctaaaagggttatgtgtagtgttttactgcataaattatgcagcaaacaagacaactcaaattaaaaaatttcctttgcttgtttttttgttgtctctgacttgactttcttgtggaagttggttgtataaggattgggacaccattgtccttcttaatttaattttattctttgctgataaaaaaaaaaaatttcatatagtgttaaataataatttgttaaataaccaaaaagtcaaatatgtttactctcgtttaaataattgagattcgttccagcaaggctaaacgattgtatagatttatgacaatatttacttttttatagataaatgttatattataataaatttatatacatatattatatgttatttattatttattattattttaaatccttcaatattttatcaaaccaactcataattttttttttatctgtaagaagcaataaaattaaatagacccactttaaggatgatccaacctttatacagagtaagagagttcaaatagtaccttttcatatacatatcaactaaaatattagaaatatcatggatcaaaccttataaagacattaaataagtggataagtataatatataaatgggtagtatataatatataaatggatacaaacttctctctttataattgttatgtctccttaacatcctaatataatacataagtgggtaatatataatatataaatggagacaaacttcttccattataattgttatgtcttcttaacacttatgtctcgttcacaatgctaaagttagaattgtttagaaagtcttatagtacacatttgtttttgtactatttgaagcattccataagccgtcacgattcagatgatttataataataagaggaaatttatcatagaacaataaggtgcatagatagagtgttaatatatcataacatcctttgtttattcatagaagaagtgagatggagctcagttattatactgttacatggtcggatacaatattccatgctctccatgagctcttacacctacatgcattttagttcatactggtgacctaagtgattaagctaactactcacagcttctcagcagggacatatgtgtcatcaatgctcgccacaagtgcagctgcaccatctgaaagccttgcatttctcagtatttcaagacgcctcaagaagcacgctcctctaagaatctgtttgttgatctgcacaacacacgggtactcatttgccactgccggatcaaggtaagttcctttgatgaaatcattgaatgaaccaatggcaggaccacaccaaacttggtagtccatgactctgtcagaagctccagtgttggcccaccttgaagccagggacagataccatctgaaacacagtgacatcttcagtttggggtccctctcagccctctgtatcttctctgggttgtggagacggttgatgtagaagttcttggtctcatcccagacctcttccaatgcacgactgaagattcttttctcaaccctcgcaagctctgctggaggcatggactcaaaagaatcatacttgcagaacaactcatagagtttgttggctcttgaagggaacattgttcctttcttcaaaacttgaagtttcacaccttcctcaaacatgtcagctgccggtgccatgcaaacatctgagtaagttgctttcgcaagctgtttcctcacattgtcacacgtcccagattgtttggcaacttggttcactgttccagtgacaatgaaagaggcacccatgttgaaagttgccagcgcagcttggggacacccaatgccacccccagcaccaacacgaaccctcaggtttgctgggtatccacactctctgtgaagcctatccctcaggttgataatcagaggcagaatgacatggattggacggttgtcagtgtgtccaccagaatcagcttcaaccgcaatgtcatcagccacaggaacacgtctggccaactcagcttgttcttgattgatctccccagaagcaatgagcttctgcaaaagatgctcaggtgcaggacgcatgaacatttcagccagctcagttctggagactttcccaatgattctgttccttatgttgactgacccatctgcattcctcgtcaacccagccgctctgtatctgacaacttgcggtgtcaacgtcatgaaggctgaagcctcaacaaaagtgacacccttttccaagaagagatcaacatttcccttctcaaggttgctgtcaaaaggagaatggatgaggttgacagcatatggtccattgggcagggcagcttgaatcttttcaatggactcacgcacaacttgcattggaaggcctccagcaccaaatgacgcaaggattccttgccttccagctgcgatcaccaagtccgcagaggcaattcccttggccattgcaccggtgtacagaggcgcagaaacaccataagttttcatgaaagctctgctgccaagatcagcaatgttgcacggagggacaatgacactggcatcagatggcgcagtctcaacaaggttgccagaagcacttgcagagctgagcgcaagcatggagtcaagatcaagcagggcactacgaagtgcatcagcactggcaacagcttttgtctccgcagctggggcagctttcttctgaactggagctgaaggagcaggagacggagatgaactgctggaagaggaactgctggaagagctggagctggaaggcgcattgtccttgttcaagatcggatctctggtctcatcttgctcatcaatgttgagacgcgcatagaatttcggagccacaggcttcatgatccttgaagagatggcagcttcaatcgcagggtccgcaggtgggaaggatgcaaggtctgctgaggagatggggtctgccttgctgttgaatctgccattcaactgaatctttctcacaaacttgtttttcttgggtttctcacctttacagagcgcagcataacaagcctcagcctctgcaacgagcttggagtggtagagcggactgatggtcactccaggaacaaggtgagccttcaatgaagccacgagcttgactattgtcgtccaagcatcctcgttctgcttgtctatggcaccagcaaggtggtttctctgtggtccaagcgtggttctcactgctgtgcttctgtgattgtttggcccaacttcaacaaacacatcatagttctgcttgtagatggtttcaactatctgagggaagttggcttgtttctcatagagctgtccagcatactccccaaaggatgaaggagcccattcatctttggcacccgtggctcttggcacaagcctcttctggtttatggtagtccagagatcaagaccatcaaccacagggaactcaaggttggcgtggatctttgcgatgtccttggtgtaaggtcccacctctgggcaatgcccacacatgccttgagtgactggaagcgcagggatgttgccaccaagacgagcaatcgcagctttgcatgcatcaggctttccactgatgagagcagtgttggcatcattgatgatggtcaacctcacatactttgagtctggtgctatggctgcttctatgtcttgtttcgttcccctcactatgtaaccttgccagaactcatcttttgggacagactgtggaatgccccaggcttctctgagcgcattgaactcaacagccagagctttgttccagacatctgactctctcaaatcctttgtcaactgatcgcttatcaaaccgtttttcttggagaaagcaaagatcatggaaatctctcccaaactgagtccaaaggctgctttgggcgtgatgttgagaacatctctcgccaggtttgtgaaggcaattgaggtgaggattccaagacggaacatttcaatcatgtttctgtcaaactcttgctgttgtgactcaagctcactcttgaagctggcccttggcatgacccatctgtcaccttcagcccagagacggtttgttttctcattgatgacctcatgaagttcaggccaaatcctatgaatgtcttgtgtgatgccatagtaagggctccttccttctccatacatgaaggcaactctgtcactggccaaaggctcaggcgcatatctgcttccagcaggggaactccaatcacgtctcatcttgagacatctcggaatgccttttgccgcaagttccacctctctctggagcttggatggagtggagaccaagctgagagcaaggggcttctgacttccagatgaagctgcatcttgggcaagggtctcaccaaggagttcaagaaagatcctacgggcttgcgccttcaattcagactctctgggtgcagcacccgtgggctgcaagaacctttcccttatcttgtccaatcttccaagaatctcttcatgggagtctgctctcaacacaatgagcttgggtgcttcctcatccaaactgattctgttctctctctcgtagtgtccctctgcttcagaaagcagcacactgtagcaacttctggtttcactgactccggaaacagccgcataacgtctctcaccagggttcttcaaccaagctcttgaggtctggcacgcaaagagtgtgctgtcccagggtgcttcaggtgcaggttcatcccagtcatctccattgctgggcaggtaacggttgtagatgcaaagcgcagccttaatcaaactggcagcaccagaagcataaccagtgtcaccaacagtggccttgacacttccagttgcaacattccttgggagcttgtcatcgtcacgaagaatcgtctgaagtccgccaatctcttcctcagcagtgagttcctttgggagaacagacgggtccttcaaatgcctcgctgaatcagcagaaagctccaacatctcgatgtctccaggcttgactctggcttgatccaatgcctctctcaaacatgcagatggaacatttccaggaactatggcatccatgcaagcatagattctgtcatccttggtgcagcttgtctcacgcttgagcacaaatgcaccacagccctctccaacaaagtaaccatcagcagctgcatcaaagctggctctcggggtgtcagatgtagacaccttgaaacgccttgacttgacgtaaaggttctcagcactcccacagagatcaacacccgcaaccacaaccccatcaacctctcccgtttccaagaggtatttgccaagttcagcacatctgtacacagaattgttgccttctgtgattgtgaaggaaggtcccgtgaagccccattgtgaactgacccttgttgcaaccaagttgcctatgtagctggtgtaagaagtgcttgtcccacaatcattgatgtactgcatcatgtcattgagtttcttgctggcttcaggcctcactctctccttgagagcaacccttgcacggtgacggtagagttcaagatcggtccccaaccccacaaagacagccacatttccacctttcttcatgccagagtccaatatggccctatcaattgtggtgacagccagaagctgttgaggcaagagcatatcttcaggagtcattggagtcctcagcctctggaaatcaacttcaacatcttcaatgtaacagccatgcggtgttgctttgactccacaaagatcaaggaagtccttgtctttccccaggaatctccatctcttttctgggagtggtatagcaccatgagcaccagtgtagatggccctttcaaaagcatccaatcctttcaaagcaccaaaagtggcatccatcccagtgattgctattctcatgtttgactcaccaccacaacgtgcagagagagcagaaatggagtcatggccagtgcatgcagcattgcttgggtcatgttcctcaaagacagcatgagcattggtcccaccaaatccaaacgctgagagaccagcacgcttcggttctccattcgtttctggccagggaatggcctcaccagagacaaccagagggtccatcttcgtttcgtcatctattcccggagtgggtggaatgatcccgtgcttcatggagagaagcactttgcacatgccagcaaacccagctgccaccaatgtgtgtccaaagttcccttttgtggttccaaaacgtgggactttgccttcaaagcaagccttcacagcatcaatttccacacgatcaccttgtggagtcccagttgcatggcattcaacatactgaatcttgtggggatgcacattgatacgtgtgtaggtgtccatgaggcactttttctctgacggcaaaaggggtttaagtggcagaccagtgccactgttgctgacattggctcccaaaagtgttccatagatgtgatctccatctctgattgcgtcatccaaacgtttgaggaccatgatggaacctccttcaccaggggtcaatccttgagaatctttgtgcagcggcatggacacattctgacccgttccaacaggcatggcttggaaggttgagaacccagagagtatgaaaaacggctccggcaggcatgttgcaccacaaagcatcacatcagctgcaccagagaccaagtgatcttgcgccagtctgagcacatagagcgcagtggcacaggcagcatcaacagagtagtggagagcgccaagattgagttcctcagcaacaaaggaagcagggtccatgaagattcttctgtcaccagcctctggtttgttggactgttctctttctgaccagtgagaggcatctttgaaaactctggcaccaagtttcttctcaacatggttctggtacacattcaagagttcaccttggaggttgtccatcgggaagctgaggcatccagaaactatgccacatcttgttgaatctttgacagatgtttcagccaaggcttgtttggcaaggttcaaaaggagttcatgctcattgtctatttcgttctcatcaagagttccatatgtctcattgcagaaggtgtcagcatacttgctcctttcagctttgtagtgttcagcacggtaatttgaaccaagacgtttgtcgctgatcactttgctctcaacttttccattcatgagaacttcccagaactcgtctttcgttttgcatccagcatactgaacagccatgcccacaacagctatcctcttctcgtcatgcatctcatgagccgcactcacgttccttgcagccatttttggttgtggatcctagagtagtattgaatatgagttgggttggggtattatagtagtagagtagtagtactctggatggatggatgatgaaagaagtgagtgatattagaggtatttataggtattatataagagagaaggtggttggaacatgcatggagatttgggcatgggatgacacgcatatgcaggttgacgtgtgttgaagtgaagaaattgaggtggcggaagagaatgaatatatacaggtggttgtggtgatgatgaagaaaaaggcaatgtgtttgtgtgtgggttgagatgggtgagccatttaaagtgcatgttaagcacgtgttgctttgcatggcatttagacatacatggacgcggcgatcttgatcagccagtgactaatttgagttggttgtgtgattgcgttttgtctctctgttttgtcttttttctttgttctttgtctttttcttgcgcaagatccatgcatgaaccaaaagaccacagagtgtcatggcaacccacagtaattccagttacggacttacataccaagaaaaggtaaaagcaataagaaatatatgaaaattagtccaccataaatcttatagtttatggtttagggtaacactctaacactctactacattacttatatttactttaaactatctataaaacaatttaaacatagtagaataataaatcaatagtcacaaattcaacaattaaacttaaaattaaaaaagtaatattttaattatatctaattaattttttagaagtaatattgagtatttgatatatgaaatcttgaatatagtaactattattaaaattactttagaagatgtgtctcgcatgtaaaagcagatctaactactgtcactgaggccgtagacgagtacggactgatctaactagtgctagcctcgaggtcgacacccagctttcttgtacaaagtggttgcggccgcttaattaaatttaaattcaattaatgcaatcttgattttcaacaacgaaggtaatggcgtaaaagaaaaaatgtatgttattgtattgatctttcatgatgttgaagcgtgccataatatgatgatgtataattaaaatattaactgtcgcattttattgaaatggcactgttatttcaaccatatctttgattctgttacatgacacgactgcaagaagtaaataatagacgccgttgttaaagaattgctatcatatgtgcctaactagagggaatttgagcgtcagacctaatcaaatattacaaaatatctcactctgtcgccagcaatggtgtaatcagcgcagacaaatggcgtaaagatcgcggaaaaacctccccgagtggcatgatagctgcctctgtattgctgatttagtcagccttatttgacttaagggtgccctcgttagtgacaaattgctttcaaggagacagccatgccccacactttgttgaaaaacaaattgcctttggggagacggtaaagccagttgctcttcaataaggaatgtcgaggaggcaatgtaaccgcctctggtagtacacttctctaatccaaaaatcaatttgtattcaagataccgcaaaaaacttatggtttaaaccctgcaggactagtccagaaggtaattatccaagatgtagcatcaagaatccaatgtttacgggaaaaactatggaagtattatgtaagctcagcaagaagcagatcaatatgcggcacatatgcaacctatgttcaaaaatgaagaatgtacagatacaagatcctatactgccagaatacgaagaagaatacgtagaaattgaaaaagaagaaccaggcgaagaaaagaatcttgaagacgtaagcactgacgacaacaatgaaaagaagaagataaggtcggtgattgtgaaagagacatagaggacacatgtaaggtggaaaatgtaagggcggaaagtaaccttatcacaaaggaatcttatcccccactacttatccttttatatttttccgtgtcatttttgcccttgagttttcctatataaggaaccaagttcggcatttgtgaaaacaagaaaaaatttggtgtaagctattttctttgaagtactgaggatacaacttcagagaaatttgtaagtttgtaggtaccagatctggatcccaaaccatgtctccggagaggagaccagttgagattaggccagctacagcagctgatatggccgcggtttgtgatatcgttaaccattacattgagacgtctacagtgaactttaggacagagccacaaacaccacaagagtggattgatgatctagagaggttgcaagatagatacccttggttggttgctgaggttgagggtgttgtggctggtattgcttacgctgggccctggaaggctaggaacgcttacgattggacagttgagagtactgtttacgtgtcacataggcatcaaaggttgggcctaggatctacattgtacacacatttgcttaagtctatggaggcgcaaggttttaagtctgtggttgctgttataggccttccaaacgatccatctgttaggttgcatgaggctttgggatacacagcccggggtacattgcgcgcagctggatacaagcatggtggatggcatgatgttggtttttggcaaagggattttgagttgccagctcctccaaggccagttaggccagttacccaaatctgagtagttagcttaatcacctagagctcgatcggcggcaatagcttcttagcgccatcccgggttgatcctatctgtgttgaaatagttgcggtgggcaaggctctctttcagaaagacaggcggccaaaggaacccaaggtgaggtgggctatggctctcagttccttgtggaagcgcttggtctaaggtgcagaggtgttagcgggatgaagcaaaagtgtccgattgtaacaagatatgttgatcctacgtaaggatattaaagtatgtattcatcactaatataatcagtgtattccaatatgtactacgatttccaatgtctttattgtcgccgtatgtaatcggcgtcacaaaataatccccggtgactttcttttaatccaggatgaaataatatgttattataatttttgcgatttggtccgttataggaattgaagtgtgcttgaggtcggtcgccaccactcccatttcataattttacatgtatttgaaaaataaaaatttatggtattcaatttaaacacgtatacttgtaaagaatgatatcttgaaagaaatatagtttaaatatttattgataaaataacaagtcaggtattatagtccaagcaaaaacataaatttattgatgcaagtttaaattcagaaatatttcaataactgattatatcagctggtacattgccgtagatgaaagactgagtgcgatattatggtgtaatacataggaattcgtttaaacgatctgcgtctaattttcggtccaacttgcacaggaaagacgtcgaccgcggtagctcttgcccagcagactgggcttccagtcctttcgctcgatcgggtccaatgttgtcctcagctgtgaaccggaagcggacgaccaacagtggaagaactgaaaggaacgagccgtctataccttgatgatcggcctctggtgaagggtatcatcgcagccaagcaagctcatgaaaggctgatgggggaggtgtataattatgaggcccacggcgggcttattctttagggaggatctatctcgttgctcaagtgcatggcgcaaagcagttattggagtgcggattttcgttggcatattattcgccacgagttagcagacgaagagaccttcatgaacgtggccaaggccagagttaagcagatgttacgccctgctgcaggcctttctattatccaatagttggttgatctttggaaagagcctcggctgaggcccatactgaaagagatcgatggatatcgatatgccatgttgtttgctagccagaaccagatcacatccgatatgctattgcagcttgacgcagatatggaggataagttgattcatgggatcgctcaggagtagctcatccatgcacgccgacaagaacagaaattccgtcgagttaacgcagccgcttacgacggattcgaaggtcatccattcggaatgtattagtttgcaccagctccgcgtcacacctgtcttcatttgaataagatgttagcaattgtttttagctttgtcttgttgtggcagggcggcaagtgcttcagacatcattctgttttcaaattttatgctggagaacagcttcttaattcctttggaaataatagactgcgtcttaaaattcagatgtctggatatagatatgattgtaaaataacctatttaagtgtcatttagaacataagttttatgaatgttcttccattttcgtcatcgaacgaataagagtaaatacaccttttttaacattacaaataagttcttatacgttgtttatacaccgggaatcatttccattattttcgcgcaaaagtcacggatattcgtgaaagcgacataaactgcgaaatttgcggggagtgtcttgagtttgcctcgaggctagcgcatgcacatagacacacacatcatctcattgatgcttggtaataattgtcattagattgtttttatgcatagatgcactcgaaatcagccaattttagacaagtatcaaacggatgtgacttcagtacattaaaaacgtccgcaatgtgttattaagttgtctaagcgtcaatttgatttacaattgaatatatcctgccccagccagccaacagctcgatttacaattgaatatatcctgccggccggcccacgcgtgtcgaggaattctgatctggcccccatttggacgtgaatgtagacacgtcgaaataaagatttccgaattagaataatttgtttattgctttcgcctataaatacgacggatcgtaatttgtcgttttatcaaaatgtactttcattttataataacgctgcggacatctacatttttgaattgaaaaaaaattggtaattactctttctttttctccatattgaccatcatactcattgctgatccatgtagatttcccggacatgaagccatttacaattgaatatatcctgccgccgctgccgctttgcacccggtggagcttgcatgttggtttctacgcagaactgagccggttaggcagataatttccattgagaactgagccatgtgcaccttccccccaacacggtgagcgacggggcaacggagtgatccacatgggacttttaaacatcatccgtcggatggcgttgcgagagaagcagtcgatccgtgagatcagccgacgcaccgggcaggcgcgcaacacgatcgcaaagtatttgaacgcaggtacaatcgagccgacgttcacgcggaacgaccaagcaagcttggctgccatttttggggtgaggccgttcgcggccgaggggcgcagcccctggggggatgggaggcccgcgttagcgggccgggagggttcgagaagggggggcaccccccttcggcgtgcgcggtcacgcgcacagggcgcagccctggttaaaaacaaggtttataaatattggtttaaaagcaggttaaaagacaggttagcggtggccgaaaaacgggcggaaacccttgcaaatgctggattttctgcctgtggacagcccctcaaatgtcaataggtgcgcccctcatctgtcagcactctgcccctcaagtgtcaaggatcgcgcccctcatctgtcagtagtcgcgcccctcaagtgtcaataccgcagggcacttatccccaggcttgtccacatcatctgtgggaaactcgcgtaaaatcaggcgttttcgccgatttgcgaggctggccagctccacgtcgccggccgaaatcgagcctgcccctcatctgtcaacgccgcgccgggtgagtcggcccctcaagtgtcaacgtccgcccctcatctgtcagtgagggccaagttttccgcgaggtatccacaacgccggcggccgcggtgtctcgcacacggcttcgacggcgtttctggcgcgtttgcagggccatagacggccgccagcccagcggcgagggcaaccagcccggtgagcgtcggaaagggtcgacggatcttttccgctgcataaccctgcttcggggtcattatagcgattttttcggtatatccatcctttttcgcacgatatacaggattttgccaaagggttcgtgtagactttccttggtgtatccaacggcgtcagccgggcaggataggtgaagtaggcccacccgcgagcgggtgttccttcttcactgtcccttattcgcacctggcggtgctcaacgggaatcctgctctgcgaggctggccggctaccgccggcgtaacagatgagggcaagcggatggctgatgaaaccaagccaaccaggaagggcagcccacctatcaaggtgtactgccttccagacgaacgaagagcgattgaggaaaaggcggcggcggccggcatgagcctgtcggcctacctgctggccgtcggccagggctacaaaatcacgggcgtcgtggactatgagcacgtccgcgagctggcccgcatcaatggcgacctgggccgcctgggcggcctgctgaaactctggctcaccgacgacccgcgcacggcgcggttcggtgatgccacgatcctcgccctgctggcgaagatcgaagagaagcaggacgagcttggcaaggtcatgatgggcgtggtccgcccgagggcagagccatgacttttttagccgctaaaacggccggggggtgcgcgtgattgccaagcacgtccccatgcgctccatcaagaagagcgacttcgcggagctggtattcgtgcagggcaagattcggaataccaagtacgagaaggacggccagacggtctacgggaccgacttcattgccgataaggtggattatctggacaccaaggcaccaggcgggtcaaatcaggaataagggcacattgccccggcgtgagtcggggcaatcccgcaaggagggtgaatgaatcggacgtttgaccggaaggcatacaggcaagaactgatcgacgcggggttttccgccgaggatgccgaaaccatcgcaagccgcaccgtcatgcgtgcgccccgcgaaaccttccagtccgtcggctcgatggtccagcaagctacggccaagatcgagcgcgacagcgtgcaactggctccccctgccctgcccgcgccatcggccgccgtggagcgttcgcgtcgtctcgaacaggaggcggcaggtttggcgaagtcgatgaccatcgacacgcgaggaactatgacgaccaagaagcgaaaaaccgccggcgaggacctggcaaaacaggtcagcgaggccaagcaggccgcgttgctgaaacacacgaagcagcagatcaaggaaatgcagctttccttgttcgatattgcgccgtggccggacacgatgcgagcgatgccaaacgacacggcccgctctgccctgttcaccacgcgcaacaagaaaatcccgcgcgaggcgctgcaaaacaaggtcattttccacgtcaacaaggacgtgaagatcacctacaccggcgtcgagctgcgggccgacgatgacgaactggtgtggcagcaggtgttggagtacgcgaagcgcacccctatcggcgagccgatcaccttcacgttctacgagctttgccaggacctgggctggtcgatcaatggccggtattacacgaaggccgaggaatgcctgtcgcgcctacaggcgacggcgatgggcttcacgtccgaccgcgttgggcacctggaatcggtgtcgctgctgcaccgcttccgcgtcctggaccgtggcaagaaaacgtcccgttgccaggtcctgatcgacgaggaaatcgtcgtgctgtttgctggcgaccactacacgaaattcatatgggagaagtaccgcaagctgtcgccgacggcccgacggatgttcgactatttcagctcgcaccgggagccgtacccgctcaagctggaaaccttccgcctcatgtgcggatcggattccacccgcgtgaagaagtggcgcgagcaggtcggcgaagcctgcgaagagttgcgaggcagcggcctggtggaacacgcctgggtcaatgatgacctggtgcattgcaaacgctagggccttgtggggtcagttccggctgggggttcagcagccagcgctttactggcatttcaggaacaagcgggcactgctcgacgcacttgcttcgctcagtatcgctcgggacgcacggcgcgctctacgaactgccgataaacagaggattaaaattgacaattgtgattaaggctcagattcgacggcttggagcggccgacgtgcaggatttccgcgagatccgattgtcggccctgaagaaagctccagagatgttcgggtccgtttacgagcacgaggagaaaaagcccatggaggcgttcgctgaacggttgcgagatgccgtggcattcggcgcctacatcgacggcgagatcattgggctgtcggtcttcaaacaggaggacggccccaaggacgctcacaaggcgcatctgtccggcgttttcgtggagcccgaacagcgaggccgaggggtcgccggtatgctgctgcgggcgttgccggcgggtttattgctcgtgatgatcgtccgacagattccaacgggaatctggtggatgcgcatcttcatcctcggcgcacttaatatttcgctattctggagcttgttgtttatttcggtctaccgcctgccgggcggggtcgcggcgacggtaggcgctgtgcagccgctgatggtcgtgttcatctctgccgctctgctaggtagcccgatacgattgatggcggtcctgggggctatttgcggaactgcgggcgtggcgctgttggtgttgacaccaaacgcagcgctagatcctgtcggcgtcgcagcgggcctggcgggggcggtttccatggcgttcggaaccgtgctgacccgcaagtggcaacctcccgtgcctctgctcacctttaccgcctggcaactggcggccggaggacttctgctcgttccagtagctttagtgtttgatccgccaatcccgatgcctacaggaaccaatgttctcggcctggcgtggctcggcctgatcggagcgggtttaacctacttcctttggttccgggggatctcgcgactcgaacctacagttgtttccttactgggctttctcagcccccgagcgcttagtgggaatttgtaccccttatcgaaccgggagcacaggatgacgcctaacaattcattcaagccgacaccgcttcgcggcgcggcttaattcaggagttaaacatcatgagggaagcggtgatcgccgaagtatcgactcaactatcagaggtagttggcgtcatcgagcgccatctcgaaccgacgttgctggccgtacatttgtacggctccgcagtggatggcggcctgaagccacacagtgatattgatttgctggttacggtgaccgtaaggcttgatgaaacaacgcggcgagctttgatcaacgaccttttggaaacttcggcttcccctggagagagcgagattctccgcgctgtagaagtcaccattgttgtgcacgacgacatcattccgtggcgttatccagctaagcgcgaactgcaatttggagaatggcagcgcaatgacattcttgcaggtatcttcgagccagccacgatcgacattgatctggctatcttgctgacaaaagcaagagaacatagcgttgccttggtaggtccagcggcggaggaactctttgatccggttcctgaacaggatctatttgaggcgctaaatgaaaccttaacgctatggaactcgccgcccgactgggctggcgatgagcgaaatgtagtgcttacgttgtcccgcatttggtacagcgcagtaaccggcaaaatcgcgccgaaggatgtcgctgccgactgggcaatggagcgcctgccggcccagtatcagcccgtcatacttgaagctaggcaggcttatcttggacaagaagatcgcttggcctcgcgcgcagatcagttggaagaatttgttcactacgtgaaaggcgagatcaccaaggtagtcggcaaataatgtctaacaattcgttcaagccgacgccgcttcgcggcgcggcttaactcaagcgttagagagctggggaagactatgcgcgatctgttgaaggtggttctaagcctcgtcttgcgatggcatttcgatccattcccattccgcgctcaagatggcttcccctcggcagttcatcagggctaaatcaatctagccgacttgtccggtgaaatgggctgcactccaacagaaacaatcaaacaaacatacacagcgacttattcacacgagctca

SEQ ID NO: 59 - DNA, 36718 bp, Artificial sequence
  plasmid pDAB108208
aattacaacggtatatatcctgccagtcagcatcatcacaccaaaagttaggcccgaatagtttgaaattagaaagctcgcaattgaggtctacaggccaaattcgctcttagccgtacaatattactcaccggatcctaaccggtttaattaaggcgcgccatgcccgggcaagcggccgcacaagtttgtacaaaaaagcaggcttctagacctaggtggagtcatcacgcagactatctcagcatgtgcgtagcacgcggccgcatcagtaagtgcatataaagaaagtaataagtagatgagtttggtaattacatgagatcgacagaggaattacgacgttcttgccatcaaaaagagattccaaatttgtaaagagccatatgtttgttgggcaattgagattgagtcttgccaatccttctttggaagttgacaatttaaaaattcgaagccagatttactcctaattaattattgagcttgaagtcttaattaccgattacatctctgagcagtagtagtcgatgatctttcccggtcactaattttactcaagcgaatcgatttttactttagtttagctaaccgtacgccattacagtttagagagcagcaagggtaagaacattattaaaacataaagtaaacctctcatttattacggtgtagtgctaattacattagcctcaaacatcctaagcttacagttttataaaacacacacgatgactgtgtatagtattaacatacatcaatagcaacactcatgatcatcgtgctaggccgggcttggactgggtgacctaagtgattaagctaactactcagaacgcaagtgagtctgtcgcaatgacagaggcttgaacatcaatgaagagatcaccttgttcgttgtggaactgaagtgcatgtttgtgctggctatgtccaccactctgattggatctgagggtgatgtagaagggtttgtcttgtgggaccggtctgtgttggactatcctctgaatggagttcgggagtgcagcttgtcccagcgttctcctcacccagaccaacattgcttgaaaggcaagatcattgacaaagggatcatgtgcatcagtgtcagttgcaaactctcctctggctgcatctgatccaggaacagcagaacacttggcaacaagctggctcttggtgcagctgagaacgtcatcaatgcctctgaacgcaggaccatgaaagagagtcttgccatcatagactgacccttgcaaagcaggatctgcatcaaggctcggaggctgcatggttgcattggcaggtggagcaccttggttggacaacactatgacagctctgtaggctggaacaagttttccacttgagaacgtcttgagcgtcgcttggacattcaccctcccactcggagcagtggacggtgtgagggtcacttcacagttgacgtctccatcaacagtgacacctttgaagagctgtgcgtcatctatggcccagagagagtagccagggaagagtccaaggcaggtctcagcaaggctcccaatagcaagggtcattggcaacacccttctgccttgtatgacatgatcctccaagaagggattggacttggcactgatctttctatgcagggtgatcgtgtcacttccaactttcttggatggtgtcctccagtttccaacaaggatctcagcaggacttgatcccaacacaatcctcgcaactgtatcagcacctccttcacgaggaatgatctgaactcccatttcttgaaactgtttcttgagttgaggtgtcaccatcccaccatcccagggaccaaagcagatggacttgacactgacatccttcgcaagttccaaacccatcttgttgagagcttcgtttgccatcgcatagtcagactgaccaacattgccgtggaaaccagcaagggagctgaagagaaccatgtgtttgaggttggcacgatcaactgcagccagaagattctccaacccagtgactttggtcccaaagacagcatcaaactcgtcagggagtttcttctctatgagacgatcacggagcacaccagaagcgtgaacgattccactaactctggcaccaagctgggactctgcatccctaactgctttggcaacatctgcagcagagttcacatcacaagagctgtagatcgctttgccacccagagcttcaatggcagcaatggagcttctcacttcacgagcaccaagaacagatcccacaagtttcgtgacagcccttggagtgggtttgggtccttcaccagcactgaaggccctcttcaactcttgggtggcagctttctgcacagccttctcatcagtgatgccagcacaccatgctggttcagacgcagaaactttgctacgacccaacagaatgtacttgcctccagcaatctgacgcgtgatctcacggatgcaaagaggtgtgatcccacgagcacctccagaaaccagaagcacatcgtctttcgctatctgtctctgagggttcccagtctccaacttggcagctctgattgtgcatctttgctggtttgctccaatcccaacctctctgattctgatgtcagcacacgccatctccctaactatggcaactgcagcatcttctgggtgcatcccttgagcaatgtccacaccacggctgaacacatcagattctgaccactccaaccctattgtcttgcagagtccaaagatcgctccacgctgtgctctcttgagtgcgtcagaagtgccttgagaggtgaatccaagtctgccgtcaagcctagccacaccgatgaaggcaggacgacctccagccacagcagtgcagagagaggctttggcaaacttcgcacacatgagtgtgaaacccagtatctcagctggttcaaacctttctgcttgctggcttatgaagcctcccaacgctccaaatctttgctcagcctctttgatggccttctcagctgattctgctgaaaggtccttagccagaacatgacgaatggcagctgcaccagctctctgagccaactgcaatccctcaaaggtcaagacaactgcacaggctcccaacaccctcacaagagcaagtgtcaactctgagccatcgtcaacgacaagaactggacggttctccggtctttccagaatcagttcatctggccttctgatgtcaaccacctttgcgtgcatcagtgacaaatcgtcacagtcagcaccatgaactgaatcaatcttcacagctggtgcagcaccggcacttgcaggagcggctgcagccggagcaggggctgatccaccagctatctcagccttcatggcatcgaccacttctccaaccgttctggtccttgacaaagcatcgacatctttggcctcaacgttcagcatggcttgaacctcagaaaggatttccacacgcttgatgctatcaatcccaagctctgtttccaactccatgtctgactctatcatgtcagtctcgtatccagtctttgcagccaaaacctccatcacaacagtttcagctttttcaaggagttcgttgctgacagctggtgccgcggcagcgggagcaggagcggctgcagctggcgcaggagcagaacccccagctatctcagccttcatggcatcaaccacctctcccaccgtccttgttctggaaagagcatcaacatctttggcctccacattcaacatcgcttgaacctcagagaggatttcaacacgtttgatggagtcaattccaagctcggtctccagttccatgtcagattcaatcatgtcggtctcatagccagttttcgcagcaaggacttccatcacaactgtctcagccttttccaggagttctgaggagacggccggtgcggctgcagctggagccggtgccgcggctgcgggtgcaggagcggctgcagctggcgcaggcgcggaacttccagcgatctccgccttcatcgcatcaacgacctcaccaactgttctggtccttgagagggcatccacatccttagcctccacattgagcattgcttggacttcactgaggatctcaacacgcttgatgctgtcaatgcccaattccgtctcaagttccatgtcagactcaatcatgtcagtctcatagccggtttttgcagccagcacttccatgacaactgtttcagccttctcaagcaattcgttgctgacagctggtgccgcggctgcgggtgcaggtgcggcagctgccggcgcaggagcagagcctccagcaatctcagccttcatcgcatcgacaacttcccccacagttcttgtcctactgagtgcatcaacatctttagcctcaacgttgagcatggcttgcacctcagagaggatctccactctcttgatggaatctattccaagttcggtctccaattccatgtctgactcaatcatgtccgtttcgtaaccagtttttgcagcaaggacttccatcacaactgtttcggctttctccagcaactcattgctgacggcaggagcggctgcagctggagcaggtgccgcggcagcaggtgcaggtgcggctgcagctggcgcactagcagagcttccggcaatttcagccttcatggcgtccacgacctcaccgactgttctggttcttgaaagcgcatcgacatcttttgcctccacgttcaacatagcttggacctcagacaagatttcaacacgtttgatgctatctattcccaactcggtttcaagctccatgtcactttcaatcatgtcggtctcgtaaccagtcttagctgcgagcacctccatcacaaccgtctcggccttttccaggagttcggatgaaacagctggcgcgggcgcggccggtgctggtgcagctggagctggagctgcggctgccggtgcaggtgccgcggcagctggcgcaggcgcgctccctccagcaatctccgccttcatggcatccacaacctcacccactgtccttgttcttgaaagtgcatcaacatccttagcttcaacattgagcatggcttggacttcactcaggatctccactcttttgatggaatcgatcccaagctctgtctccaattccatatcagattcaatcatgtcggtctcatagccagtctttgcagccaaaacctccatcacaaccgtctcagccttctccaagagttctgaagaaacggcaggtgcaggtgcagctggagcaggtgccgcggctgcgggtgcaggagcggctgcagctggcgcgggcgcagaccctccagcaatttcagccttcatggcatccacaacctcaccaacggtcctcgttctggacagagcatcaacatccttcgcttccacgttcagcatagcttggacctcactgaggatttcaacacgtttgatgctgtctatcccaagttctgtctccaattccatgtcagactcaatcatgtcagtctcatagccggttttagctgccaagacctccatcacgacggtctcagctttttcaaggagttcgtttgagacggccggagcggctgcagctggagctggagccgcggcagcgggaccaggagcggcagcggccggcgcaggagcggagcctccagctatctcagccttcatggcattgacaacctcaccgacagttctggtccttgagagagcatccacatccttagcttccacattgagcatggcttggacttcactgaggatttccacacgcttgatggaatcaattccaagctccgtctcaagctccatgtctgattctatcatgtcagtttcgtagccagttttggcagcaaggacttccatcacaacagtttctgccttttcgagcagctcattagaaacagctggtgcagctgcagctggagccgctttagccggtgcaggtgcggcagctgccggcgccggagcggaagaaccagcgatttctgccttcatagcgttgacaacttcacccactgttctcgtcctagagagagcatcaacatctttcgcctcaacgttaagcatagcttggacttcagaaagaatttcaaccctcttgatgctgtcaattcccaactcagtctcaagctccatgtccgcctcaatcatgtctgtttcgtatccagtcttggcagcgagaacctccatcacaactgtctcagctttctcaagcaactcgttggacacggcgggagcaggagcacttgcaacgggagcggcaggggcagcggctttaacaggcgccggagcagtctgttgctgttgctgttgctgaagggaagaagcatcaacacttccataaccatccagctcagccagcatggacttgaggatggcacgatgtttctccacaacagcagtgtcaactgcaggcttggctgaagctgcagcagtcttggcttcctccttggcagcagcaagtttggagttggcttctgcagctgcacgtttggcgtcgtcaagctgcctctgagcgtcttgaagctccttctgaagcctttcagcctccctcttggcagcttcgtcaaccacaggttcaggagccttgatgagtggtgcagcacccttgaggtatgtgacacatcttccgtcgttcatggcagcatccctcactttcttggtcttgtcactgacataggtggcagctgaaagtctgagtgtggttctctttttcttgatggcttgcatcctcgtggcatcaggagcatcccacttgtcaaacccttgaagattgacaccagccacaaccagctgaactgcagcatccctcaactgtatgtcagagtccgtgccagaagctgggttcacagacactgtgacaacagacgggtcatctttgagggtttcagaaacaagtttgctgagaacttgtttcggtccaaactcaacaaagattctcgcaccagcttggtgcatgttcctcacttgggtcaggaacttcacagatgaggtcatgtgttgagtgagcatctctctggcatccgtcggataggtctctccagaaacattgctgaagagctttgtttctgctttgggtgtacggaaggaaaccttggatatgacatctttgaaagctgagctggcattttccatctgtggagaatggaaggcagactcacaagcaagaggcacaactctgaacccttccttctgcaatctggcactttcagcttgaatcccttcaacagacccagtaatgacagtctgagacggagagtttgagtttccaagccagacgttggcagcttgaaccttgatgttctctgcgttgggtcctatgacagctgccatgcaacctttgggtgtggcaggtgcatctttgcctcccatgatccttgcccttctgcaaacaagttcaaacaactcatctctgtcaacacaaccagctgcatagagcgcagcaaactcacccaagctgtgtccagctgcaaagtctggagtgaatccagcttccttgaaaatctcaaaggcaccaagagcacatgccagggttgacggctggctgtatgctgtgagtgagattttcttgtgatcttgttctggctcacgttcgtacggtttccttgggtacaggacttgagagactctttcaaagtctttgtcacttccagcaaccttggactgtgcagcgtccattgcagcaatggactgtctgaactgaggccagttcatcgcaacttcactgaacatgtgtgtgtactgagcaccttgtccagagaagagtgcagcaacagcaccattggtggcaatgcctttggcacggaaagaaactccttctctcggaagcctccacgcttctttggtcacatctttggcaaactgagcacatatagcacgaagcgtggagcacgcatcctccgcatctttgaccaagaatcccagtctcgcattggtcgcaggtatgctcccagggaacttgaactgttctccaaacttgacacacttgatgtaggcagtattcttgactgtctcattctccttgatcgcagcttcaaactctttcagctgagcttcacaaaggctctgcaacgcagcaggagttgcagccatcatcaacaccggttgtggacgtttgttgagtctgtacgctgtcgtgtgctctggttcagcctcttccaacactgcatggtagttggcacctccaaagccaaagctggatattccagcacgtctcggaacaccaggtggagggaaccagggtctgttcatcgtgttgatgtagagggatgactcattgatgggagtgttgtcatagagattgggtggattgtccacattgatcgttccaggcaaagtcttgtgtttgagagccatgatgaccttgatcattccagcaagaccagcaacagccttcaaatgaccaatactggacttgatacttccaactgcaactttctctgtgttcccttcaccatacgctttgtcaaacaagttcctcaacgcagtcaactcaatcctatctccaactggagtgccagtcccatgaccctcaaccaaagtgacagtggcagggtcaacgcaggcacgattgtatgcacgtctcaaggcttcctcttgaccactgattgtgggagtgtagatgccagctgctttgccatcacttgagcttgcacaaccacgaatcacagcatgaatctcatcaccatccctcactgcatctgcataacgtttgagcaccaacatggctgatccctcaccaatgagcatccctttcgttttctcatcatacgctctcacacttgggtccgtgctgaacacaggtgtctttgagaaagccatgtacatcccaatggagttgtctgtgcaggttgcaccagtgaccatcatgtcgcagtcaccatagagcagttcatcaatcgcaaccttgactgctatcaaggagcttgcacatgcagcatccacaacgcagttcatgccatccaagttgaatgtgttggtgcatctgccagcagtgacattcccaaggaatccagggaaagagtcaagtctccattctgggaagttcgctttgtacttctccacagccactttgacatcttcctctggcatccccatctttctcaagactttctccacaaccacatagttgagtctgctgtagaactcatgtgaactcttctgtccacctccaatgccaagcacgcatcctatgtttttcttctcctttccaagtgcatcaatcccagcatcttgaagtgcttctttgaccttgagaagtgagatggtctgattcgcatcagaatcttccatctggaacatgttgagaccaaactcacgcgcatcaaagtcatactcaggaatgaaacctcctctcttgcagtagattttgtcctttgtggtcttgactgggtcaaagtacgcagtcacatcaacacgatcctcaggaagatcagacaggcaatcaatgccagcccttatggtctcccatgactctctcaccgtggttccacaaggaagtatggcgctcatgcctatgatcgcaatcctcgtgtccatctcacctcctttctgctcttgcagcctcgctgccatttttggttgtggatccgttttgctatttgtgtatgttttcttgttttggtttgagtttaaccatcattctcttctctctatttatagagagaagaggttggcacgcagcactgcgacatgagagaaagacacgggtgaagaggcgggagctgaggtggcagcatgcatgcatgcatggccagtcgtgtcatagtgagaagaggagaaagctgaggtggcaacgtgtatggccagtggtgtcatagtgtgaaagctgacgtggcagcatgcatggtgagtgtgaaaaaggcgccacagtgcagatgttactgaacaaaagcggtgtgccatgcaacttttgcccatcgtcgtctttctcatccaagttcctctttataatatcttttaccaaatcatattttaatataaattcattttatttttaaataaagtaatattatatccataaatattaactctcatttaacacattttcaaatttaacacttctgtaaataaatttattaacaaaaacttgtaaatatgttcaaataaatccataaatattaactttcattttattaacaaaaaaatctttactataagctgcggccgcttaattaagatgagtgatactcaggactcaggactcactctgctgatcactagtgctagcctcgaggtcgacacaactttgtatacaaaagttgtctaggatctgcttttacatgcgagacacatcttctaaagtaattttaataatagttactatattcaagatttcatatatcaaatactcaatattacttctaaaaaattaattagatataattaaaatattacttttttaattttaagtttaattgttgaatttgtgactattgatttattattctactatgtttaaattgttttatagatagtttaaagtaaatataagtaatgtagtagagtgttagagtgttaccctaaaccataaactataagatttatggtggactaattttcatatatttcttattgcttttaccttttcttggtatgtaagtccgtaactggaattactgtgggttgccatgacactctgtggtcttttggttcatgcatggatcttgcgcaagaaaaagacaaagaacaaagaaaaaagacaaaacagagagacaaaacgcaatcacacaaccaactcaaattagtcactggctgatcaagatcgccgcgtccatgtatgtctaaatgccatgcaaagcaacacgtgcttaacatgcactttaaatggctcacccatctcaacccacacacaaacacattgcctttttcttcatcatcaccacaaccacctgtatatattcattctcttccgccacctcaatttcttcacttcaacacacgtcaacctgcatatgcgtgtcatcccatgcccaaatctccatgcatgttccaaccaccttctctcttatataatacctataaatacctctaatatcactcacttctttcatcatccatccatccagagtactactactctactactataataccccaacccaactcatattcaatactactctaggatccacaaccaaaaatgcttcagcacacttggcttccgaagcctcccaatctgaccctcttgtcagatgaggttcatctctggaggattcctcttgaccagcctgagtcacaacttcaagaccttgctgccaccctgagcagtgatgaattggcgagggcaaacagattctactttccagaacacagaaggcgtttcactgctgggagaggcatcctcagatccatcttgggtggatacttgggagtggaaccgggtcaagtcaagtttgattatgagtcccgtgggaaaccgatccttggtgacagatttgctgagagtggactcctgttcaacttgtctcacagccagaaccttgccttgtgtgctgtcaactacacgcgtcaaataggcattgatcttgaatatctgcgtccaacatctgacttggagtctcttgcaaagaggttctttctcccaagagaatatgaactcttgaggtcactccctgatgagcagaaacagaagattttctttcgttactggacttgcaaagaggcttatctcaaagcaacgggagatggaatagccaaacttgaagagatcgagatagcactcaccccaacagaacctgccaagctccaaacagctcctgcgtggtctctgttggagcttgtgccagatgacaattgtgttgcagctgtggctgttgcgggttttggttggcagcccaagttctggcattactgagtagttagcttaatcacttaggtcaccagtatgaactaaaatgcatgtaggtgtaagagctcatggagagcatggaatattgtatccgaccatgtaacagtataataactgagctccatctcacttcttctatgaataaacaaaggatgttatgatatattaacactctatctatgcaccttattgttctatgataaatttcctcttattattataaatcatctgaatcgtgacggcttatggaatgcttcaaatagtacaaaaacaaatgtgtactataagactttctaaacaattctaactttagcattgtgaacgagacataagtgttaagaagacataacaattataatggaagaagtttgtctccatttatatattatatattacccacttatgtattatattaggatgttaaggagacataacaattataaagagagaagtttgtatccatttatatattatatactacccatttatatattatacttatccacttatttaatgtctttataaggtttgatccatgatatttctaatattttagttgatatgtatatgaaaaggtactatttgaactctcttactctgtataaaggttggatcatccttaaagtgggtctatttaattttattgcttcttacagataaaaaaaaaattatgagttggtttgataaaatattgaaggatttaaaataataataaataataaataacatataatatatgtatataaatttattataatataacatttatctataaaaaagtaaatattgtcataaatctatacaatcgtttagccttgctggaacgaatctcaattatttaaacgagagtaaacatatttgactttttggttatttaacaaattattatttaacactatatgaaattttttttttttatcagcaaagaataaaattaaattaagaaggacaatggtgtcccaatccttatacaaccaacttccacaagaaagtcaagtcagagacaacaaaaaaacaagcaaaggaaattttttaatttgagttgtcttgtttgctgcataatttatgcagtaaaacactacacataacccttttagcagtagagcaatggttgaccgtgtgcttagcttcttttattttatttttttatcagcaaagaataaataaaataaaatgagacacttcagggatgtttcaacccttatacaaaaccccaaaaacaagtttcctagcaccctaccaacgaattcggtcacctcgagtatcaaaatctatttagaaatacacaatattttgttgcaggcttgctggagaatcgatctgctatcataaaaattacaaaaaaattttatttgcctcaattattttaggattggtattaaggacgcttaaattatttgtcgggtcactacgcatcattgtgattgagaagatcagcgatacgaaatattcgtagtactatcgataatttatttgaaaattcataagaaaagcaaacgttacatgaattgatgaaacaatacaaagacagataaagccacgcacatttaggatattggccgagattactgaatattgagtaagatcacggaatttctgacaggagcatgtcttcaattcagcccaaatggcagttgaaatactcaaaccgccccatatgcaggagcggatcattcattgtttgtttggttgcctttgccaacatgggagtccaaggttggcgcgccgaattcgcggccgcttaattaactactgtcactgaggccgtagacgagtacggactgatctaactagtgctagcctcgaggtcgaccaacttttctatacaaagttgtctagacctaggactaggcactgagtgactcactgacctgactgagtgactggcggccgcatcagtaagtgcatataaagaaagtaataagtagatgagtttggtaattacatgagatcgacagaggaattacgacgttcttgccatcaaaaagagattccaaatttgtaaagagccatatgtttgttgggcaattgagattgagtcttgccaatccttctttggaagttgacaatttaaaaattcgaagccagatttactcctaattaattattgagcttgaagtcttaattaccgattacatctctgagcagtagtagtcgatgatctttcccggtcactaattttactcaagcgaatcgatttttactttagtttagctaaccgtacgccattacagtttagagagcagcaagggtaagaacattattaaaacataaagtaaacctctcatttattacggtgtagtgctaattacattagcctcaaacatcctaagcttacagttttataaaacacacacgatgactgtgtatagtattaacatacatcaatagcaacactcatgatcatcgtgctaggccgggcttggactgggtgacctaagtgattaagctaactactcaaagcgcattcgttggctcatagacaaaggcagcatcttcagtctcaagatcaatcctcggatcatttctcagagcattaagacgcctcaggtaacatgcaccacgcaaaatctgaaggttgatctggacaacacatgggtactcattagagacagcaggatcaagatatgttcctttgatgaagtcattgaaggctccaatggctggaccacaccagacttgatagtccatgacacgatcaggagcacccatgttggcccaacgtgatgcaagaccaagataccatctgaaacacaaagacatcttgagtttggggtcatgttccgctctctgtatcttctctggattcttcaaaccattgatgtaaaagtccttggtctcttcccagacctcttgaagtgccctcttgaagatcctcttctcgatcctttcaagttcagcaggaggcattgaatcgaaagagtcgtacttgcaaaagagttcgtacaatttgttagctcttgatgggaacattgttcccttcttgagaacttggagtttcacaccttcctcaaacatatcagctgctggagccatgcaaatgtcactgtaggtggcttgactgagttgttttctcacgttgtcacatgtcccggactgtttagcaacttgattgacagtcccagtcactatgaaggcagctcccattgtgagggcagccgcagcagcttgtgggcagccaacaccgcctccagctccaactctgactctaaggtgcgcaggataaccacactctctgtgcagtctgttcctaaggttgatgatcaaaggcaagatgacgtggatgggacggttgtcagtgtgaccaccagaatcagcttcaacagcgatgtcgtctgcgacaggaacacgacgggcaagttcggcttgttcttgtgttatctcaccagaagctatgagtttctcaaggaggtgttccggagccggtctgatgaacatttcggcgagttctgttctggacacttttccaatgatacggtttctgatgttgacactcccatcagcgttccttgagagtccggctgcacggtaacgaacaacttggggagtgagggtcatgaatgcagaagcctccaccacagtaacgcccttttcgaggaagagatcaacattccccttttccaagttgctgtcaaaaggtgaatgaatgaggttcacagcatatggtccttgaggcagagccgcttgtatcttctccaaagctgccctcacatggtgcattggaagcccacccgctccaaaagaacccaatatcttcctcttcccagcagcaatgacaaggtccgcagacgcaattcccttggccattgctccagtgtacagaggtgctgacacattgtacgtttccatgaaggacttgtcaccaagatcacttatggagcatggtttgatactgacaatccttgaagaagttgcaggtttggattcaaactgcaccaaattggagttttcaacaccaagatacaatggattgtccacttcaagcaggacatctctcaactgagtcggactgagtgcaactccagttttcccagggtccgcttttgcgctgggtggctgttgttgaacatccggaatggcttgaggttttgcactgacaacacgaactctgagttctttggcttcatacacacggagaccatcaacccaaagtgctccatctgccactatgtcaacgtagcctccattttcaggagaggctgtgattgaaactatgtgcacctcacagtccatcgcacggttctttggtgtcaattgaccacggtacttccacgccgtttttccaggggcatgggcaaaggtcggattgctcacattgtattctcccggtatgttctggtccaccgcaaatgcctcaatgagctggaacattgactcaattcccaaagatccaggcatcacaggatcaaaccaaaagtgacaagagaagaaccagtcttgtgggttaacatctttgtgtccatgcgcatatcctttcccatgcagcccagaatcaggagcaatgttgaggtaatccaaatactcacactgttctgaccttctgagaacttgagcattagttgcatctggaagtttctcagtcagctgttctttgcctttggctgatgcgatttcaactcttctcacactcgtgttgttagttttgcaccaaggctccgtctttttcccattgtcaagtccagcttgctgagcaaacacctctggagtgaaccatccaaaggaagtgcttcctttgtagaaaaccacgccatcaacagacaactcaaacgtgaatctgtgaatccccatctttcccaacattgcatatccagtgcacttggtcacattccttatggttttccccctcacatccacatctggcctcaccatttcagcacttgcatcaaggttcctaaagagaatgtcatctttgtccatcgtcagtggtgctttcaacacactggtgagaacaccggatgtctgaagtccgatttccatgatgatggaataaggcatgtgcccatcattgcaagaaccatcaaagaaccacgcatcttgaggacagtcaaactcccccaccattgtgcctttgctgggattgcaatcaacattcaggaacttgccatgttccatgtttgtgacttcaacaactctagtcacaagagccaaatcaaaagcagggcttctgctcgtatttgacttatcaaatcttgcgaactctggtcccaagcagttgctaacttttccacacatgaactctgacatgttgtaccagttcagaggcatttctccagctttgcaattgttgtcaagtgggttgccagggaaagggatgaagcaaattgccctcggagggtaagaactaggggagaagaacggcgtcgggttgccaggaagttttgacatgggatgccaggacatttctttcggagcgagagcgtcacccttgaggatatgttcaggaagtgcaactggctttggcgcaagaacatctgctgagaaagcaggcttcgcaggggcagcagaagcactagcactggcaccagagctggccttggacgcttccggtcccacagtggctgcaccgttagcaaaaacgggctgaactttggaggggttcttgttcgtggatctcttctgcatcttgagagcaatgcccttgaagtccacgacgatctttttgttaagatccccctttccgtagtcgctgattctatcaaggctgaaatcttgacccttttcgaaatcaacgtcaatgatgttgacgtcagcaatggcgtacggatcgttatcctcgtcgaatcccatctctttgatctccatgacgtagaccaactttcccttatgaggagatatctgacccctacacctaactttgttcgggtgtccgttgacgggtctgaagtcaaatggtccggtggtaaggtgcaaaccgagccagatcatgtacatcttgagcatttgtgaacaaccgtcgctgacaagagatccagccatgacttgatccttaacaaaatggcatgggaagtaccaatggtccctctccaagattttctcaccaaccaactgacccaaaccgtacacacctcccttatggtcaatgctggtgactctatcaatcatgagcatcttacgtgcgcagagtttgtagttgatctccggcatgccattctttgagccaaaaacggaagcccaatctttgtcaaccaaggtctgcatctccttttcgttgagttttgttttgtgaaggcagggagcgacagcatagggagaaacatcttgctttggaatcttagctctggcagccaaatcccctcttgtgaacaccacaccctttcccgcatcaagctcctcatttgtgaagaagccagcacagccatctctcatctcaatgagaagcctcccattgacatagcagtcatactcaaagaagaacatggagatgccaccatccaaacgtttggcaaaaccggtcactctgatgtcatactcaagggtctctccctcatgggcaaccccatagaatgtcaacgtggtgttgagcagacggtaaactctgtcaccttggttctggaaatcaattcccatgtatgatatcagcatcaaatcgcactgtccactctcaaccagaactgcccagggacaatcacctccctcagacaattcgccattcactggaagatcatactcagtgaccattctggcaccaactctgtagttgttgacctcggcatccatgagtgtgacccttgtcacaagcaggtattcacgagcaggcagcctcacccttctggggtacttgtctatgacagcaaactccggaccaaaaaccttagctatgtcaccctctgcaaactccaggagttcctcatagttgaacacctcagttttgccagaggtcagttcctccttggtcatctcccaacatggcttcttgttggtcttgacacgaagcgccatttttggttgtggatccgttttgctatttgtgtatgttttcttgttttggtttgagtttaaccatcattctcttctctctatttatagagagaagaggttggcacgcagcactgcgacatgagagaaagacacgggtgaagaggcgggagctgaggtggcagcatgcatgcatgcatggccagtcgtgtcatagtgagaagaggagaaagctgaggtggcaacgtgtatggccagtggtgtcatagtgtgaaagctgacgtggcagcatgcatggtgagtgtgaaaaaggcgccacagtgcagatgttactgaacaaaagcggtgtgccatgcaacttttgcccatcgtcgtctttctcatccaagttcctctttataatatcttttaccaaatcatattttaatataaattcattttatttttaaataaagtaatattatatccataaatattaactctcatttaacacattttcaaatttaacacttctgtaaataaatttattaacaaaaacttgtaaatatgttcaaataaatccataaatattaactttcattttattaacaaaaaaatctttactataagctgcggccgcttaattaatcacgagtggatgactgtcacgactgactcatgactgactactagtgctagcctcgaggtcgacacaactttgtataataaagttgtctagtctgcttttacatgcgagacacatcttctaaagtaattttaataatagttactatattcaagatttcatatatcaaatactcaatattacttctaaaaaattaattagatataattaaaatattacttttttaattttaagtttaattgttgaatttgtgactattgatttattattctactatgtttaaattgttttatagatagtttaaagtaaatataagtaatgtagtagagtgttagagtgttaccctaaaccataaactataagatttatggtggactaattttcatatatttcttattgcttttaccttttcttggtatgtaagtccgtaactggaattactgtgggttgccatgacactctgtggtcttttggttcatgcatggatcttgcgcaagaaaaagacaaagaacaaagaaaaaagacaaaacagagagacaaaacgcaatcacacaaccaactcaaattagtcactggctgatcaagatcgccgcgtccatgtatgtctaaatgccatgcaaagcaacacgtgcttaacatgcactttaaatggctcacccatctcaacccacacacaaacacattgcctttttcttcatcatcaccacaaccacctgtatatattcattctcttccgccacctcaatttcttcacttcaacacacgtcaacctgcatatgcgtgtcatcccatgcccaaatctccatgcatgttccaaccaccttctctcttatataatacctataaatacctctaatatcactcacttctttcatcatccatccatccagagtactactactctactactataataccccaacccaactcatattcaatactactctaggatccacaaccaaaaatggctgcaaggaacgtgagtgcggctcatgagatgcatgacgagaagaggatagctgttgtgggcatggctgttcagtatgctggatgcaaaacgaaagacgagttctgggaagttctcatgaatggaaaagttgagagcaaagtgatcagcgacaaacgtcttggttcaaattaccgtgctgaacactacaaagctgaaaggagcaagtatgctgacaccttctgcaatgagacatatggaactcttgatgagaacgaaatagacaatgagcatgaactccttttgaaccttgccaaacaagccttggctgaaacatctgtcaaagattcaacaagatgtggcatagtttctggatgcctcagcttcccgatggacaacctccaaggtgaactcttgaatgtgtaccagaaccatgttgagaagaaacttggtgccagagttttcaaagatgcctctcactggtcagaaagagaacagtccaacaaaccagaggctggtgacagaagaatcttcatggaccctgcttcctttgttgctgaggaactcaatcttggcgctctccactactctgttgatgctgcctgtgccactgcgctctatgtgctcagactggcgcaagatcacttggtctctggtgcagctgatgtgatgctttgtggtgcaacatgcctgccggagccgtttttcatactctctgggttctcaaccttccaagccatgcctgttggaacgggtcagaatgtgtccatgccgctgcacaaagattctcaaggattgacccctggtgaaggaggttccatcatggtcctcaaacgtttggatgacgcaatcagagatggagatcacatctatggaacacttttgggagccaatgtcagcaacagtggcactggtctgccacttaaaccccttttgccgtcagagaaaaagtgcctcatggacacctacacacgtatcaatgtgcatccccacaagattcagtatgttgaatgccatgcaactgggactccacaaggtgatcgtgtggaaattgatgctgtgaaggcttgctttgaaggcaaagtcccacgttttggaaccacaaaagggaactttggacacacattggtggcagctgggtttgctggcatgtgcaaagtgcttctctccatgaagcacgggatcattccacccactccgggaatagatgacgaaacgaagatggaccctctggttgtctctggtgaggccattccctggccagaaacgaatggagaaccgaagcgtgctggtctctcagcgtttggatttggtgggaccaatgctcatgctgtctttgaggaacatgacccaagcaatgctgcatgcactggccatgactccatttctgctctctctgcacgttgtggtggtgagtcaaacatgagaatagcaatcactgggatggatgccacttttggtgctttgaaaggattggatgcttttgaaagggccatctacactggtgctcatggtgctataccactcccagaaaagagatggagattcctggggaaagacaaggacttccttgatctttgtggagtcaaagcaacaccgcatggctgttacattgaagatgttgaagttgatttccagaggctgaggactccaatgactcctgaagatatgctcttgcctcaacagcttctggctgtcaccacaattgatagggccatattggactctggcatgaagaaaggtggaaatgtggctgtctttgtggggttggggaccgatcttgaactctaccgtcaccgtgcaagggttgctctcaaggagagagtgaggcctgaagccagcaagaaactcaatgacatgatgcagtacatcaatgattgtgggacaagcacttcttacaccagctacataggcaacttggttgcaacaagggtcagttcacaatggggcttcacgggaccttccttcacaatcacagaaggcaacaattctgtgtacagatgtgctgaacttggcaaatacctcttggaaacgggagaggttgatggggttgtggttgcgggtgttgatctctgtgggagtgctgagaacctttacgtcaagtcaaggcgtttcaaggtgtctacatctgacaccccgagagccagctttgatgcagctgctgatggttactttgttggagagggctgtggtgcatttgtgctcaagcgtgagacaagctgcaccaaggatgacagaatctatgcttgcatggatgccatagttcctggaaatgttccatctgcatgtttgagagaggcattggatcaagccagagtcaagcctggagacatcgagatgttggagctttctgctgattcagcgaggcatttgaaggacccgtctgttctcccaaaggaactcactgctgaggaagagattggcggacttcagacgattcttcgtgacgatgacaagctcccaaggaatgttgcaactggaagtgtcaaggccactgttggtgacactggttatgcttctggtgctgccagtttgattaaggctgcgctttgcatctacaaccgttacctgcccagcaatggagatgactgggatgaacctgcacctgaagcaccctgggacagcacactctttgcgtgccagacctcaagagcttggttgaagaaccctggtgagagacgttatgcggctgtttccggagtcagtgaaaccagaagttgctacagtgtgctgctttctgaagcagagggacactacgagagagagaacagaatcagtttggatgaggaagcacccaagctcattgtgttgagagcagactcccatgaagagattcttggaagattggacaagataagggaaaggttcttgcagcccacgggtgctgcacccagagagtctgaattgaaggcgcaagcccgtaggatctttcttgaactccttggtgagacccttgcccaagatgcagcttcatctggaagtcagaagccccttgctctcagcttggtctccactccatccaagctccagagagaggtggaacttgcggcaaaaggcattccgagatgtctcaagatgagacgtgattggagttcccctgctggaagcagatatgcgcctgagcctttggccagtgacagagttgccttcatgtatggagaaggaaggagcccttactatggcatcacacaagacattcataggatttggcctgaacttcatgaggtcatcaatgagaaaacaaaccgtctctgggctgaaggtgacagatgggtcatgccaagggccagcttcaagagtgagcttgagtcacaacagcaagagtttgacagaaacatgattgaaatgttccgtcttggaatcctcacctcaattgccttcacaaacctggcgagagatgttctcaacatcacgcccaaagcagcctttggactcagtttgggagagatttccatgatctttgctttctccaagaaaaacggtttgataagcgatcagttgacaaaggatttgagagagtcagatgtctggaacaaagctctggctgttgagttcaatgcgctcagagaagcctggggcattccacagtctgtcccaaaagatgagttctggcaaggttacatagtgaggggaacgaaacaagacatagaagcagccatagcaccagactcaaagtatgtgaggttgaccatcatcaatgatgccaacactgctctcatcagtggaaagcctgatgcatgcaaagctgcgattgctcgtcttggtggcaacatccctgcgcttccagtcactcaaggcatgtgtgggcattgcccagaggtgggaccttacaccaaggacatcgcaaagatccacgccaaccttgagttccctgtggttgatggtcttgatctctggactaccataaaccagaagaggcttgtgccaagagccacgggtgccaaagatgaatgggctccttcatcctttggggagtatgctggacagctctatgagaaacaagccaacttccctcagatagttgaaaccatctacaagcagaactatgatgtgtttgttgaagttgggccaaacaatcacagaagcacagcagtgagaaccacgcttggaccacagagaaaccaccttgctggtgccatagacaagcagaacgaggatgcttggacgacaatagtcaagctcgtggcttcattgaaggctcaccttgttcctggagtgaccatcagtccgctctaccactccaagctcgttgcagaggctgaggcttgttatgctgcgctctgtaaaggtgagaaacccaagaaaaacaagtttgtgagaaagattcagttgaatggcagattcaacagcaaggcagaccccatctcctcagcagaccttgcatccttcccacctgcggaccctgcgattgaagctgccatctcttcaaggatcatgaagcctgtggctccgaaattctatgcgcgtctcaacattgatgagcaagatgagaccagagatccgatcttgaacaaggacaatgcgccttccagctccagctcttccagcagttcctcttccagcagttcatctccgtctcctgctccttcagctccagttcagaagaaagctgccccagctgcggagacaaaagctgttgccagtgctgatgcacttcgtagtgccctgcttgatcttgactccatgcttgcgctcagctctgcaagtgcttctggcaaccttgttgagactgcgccatctgatgccagtgtcattgtccctccgtgcaacattgctgatcttggcagcagagctttcatgaaaacttatggtgtttctgcgcctctgtacaccggtgcaatggccaagggaattgcctctgcggacttggtgatcgcagctggaaggcaaggaatccttgcgtcatttggtgctggaggccttccaatgcaagttgtgcgtgagtccattgaaaagattcaagctgccctgcccaatggaccatatgctgtcaacctcatccattctccttttgacagcaaccttgagaagggaaatgttgatctcttcttggaaaagggtgtcacttttgttgaggcttcagccttcatgacgttgacaccgcaagttgtcagatacagagcggctgggttgacgaggaatgcagatgggtcagtcaacataaggaacagaatcattgggaaagtctccagaactgagctggctgaaatgttcatgcgtcctgcacctgagcatcttttgcagaagctcattgcttctggggagatcaatcaagaacaagctgagttggccagacgtgttcctgtggctgatgacattgcggttgaagctgattctggtggacacactgacaaccgtccaatccatgtcattctgcctctgattatcaacctgagggataggcttcacagagagtgtggatacccagcaaacctgagggttcgtgttggtgctgggggtggcattgggtgtccccaagctgcgctggcaactttcaacatgggtgcctctttcattgtcactggaacagtgaaccaagttgccaaacaatctgggacgtgtgacaatgtgaggaaacagcttgcgaaagcaacttactcagatgtttgcatggcaccggcagctgacatgtttgaggaaggtgtgaaacttcaagttttgaagaaaggaacaatgttcccttcaagagccaacaaactctatgagttgttctgcaagtatgattcttttgagtccatgcctccagcagagcttgcgagggttgagaaaagaatcttcagtcgtgcattggaagaggtctgggatgagaccaagaacttctacatcaaccgtctccacaacccagagaagatacagagggctgagagggaccccaaactgaagatgtcactgtgtttcagatggtatctgtccctggcttcaaggtgggccaacactggagcttctgacagagtcatggactaccaagtttggtgtggtcctgccattggttcattcaatgatttcatcaaaggaacttaccttgatccggcagtggcaaatgagtacccgtgtgttgtgcagatcaacaaacagattcttagaggagcgtgcttcttgaggcgtcttgaaatactgagaaatgcaaggctttcagatggtgcagctgcacttgtggcgagcattgatgacacatatgtccctgctgagaagctgtgagtagttagcttaatcacttaggtcacctcgagtatcaaaatctatttagaaatacacaatattttgttgcaggcttgctggagaatcgatctgctatcataaaaattacaaaaaaattttatttgcctcaattattttaggattggtattaaggacgcttaaattatttgtcgggtcactacgcatcattgtgattgagaagatcagcgatacgaaatattcgtagtactatcgataatttatttgaaaattcataagaaaagcaaacgttacatgaattgatgaaacaatacaaagacagataaagccacgcacatttaggatattggccgagattactgaatattgagtaagatcacggaatttctgacaggagcatgtcttcaattcagcccaaatggcagttgaaatactcaaaccgccccatatgcaggagcggatcattcattgtttgtttggttgcctttgccaacatgggagtccaaggttggcgcgccgaattcgcggccgcttaattaatctgacctgaccactagacctgagtgagtacagatgtgctactagtgctagcctcgaggtcgacacccagctttcttgtacaaagtggttgcggccgcttaattaaatttaaattcaattaatgcaatcttgattttcaacaacgaaggtaatggcgtaaaagaaaaaatgtatgttattgtattgatctttcatgatgttgaagcgtgccataatatgatgatgtataattaaaatattaactgtcgcattttattgaaatggcactgttatttcaaccatatctttgattctgttacatgacacgactgcaagaagtaaataatagacgccgttgttaaagaattgctatcatatgtgcctaactagagggaatttgagcgtcagacctaatcaaatattacaaaatatctcactctgtcgccagcaatggtgtaatcagcgcagacaaatggcgtaaagatcgcggaaaaacctccccgagtggcatgatagctgcctctgtattgctgatttagtcagccttatttgacttaagggtgccctcgttagtgacaaattgctttcaaggagacagccatgccccacactttgttgaaaaacaaattgcctttggggagacggtaaagccagttgctcttcaataaggaatgtcgaggaggcaatgtaaccgcctctggtagtacacttctctaatccaaaaatcaatttgtattcaagataccgcaaaaaacttatggtttaaaccctgcaggactagtccagaaggtaattatccaagatgtagcatcaagaatccaatgtttacgggaaaaactatggaagtattatgtaagctcagcaagaagcagatcaatatgcggcacatatgcaacctatgttcaaaaatgaagaatgtacagatacaagatcctatactgccagaatacgaagaagaatacgtagaaattgaaaaagaagaaccaggcgaagaaaagaatcttgaagacgtaagcactgacgacaacaatgaaaagaagaagataaggtcggtgattgtgaaagagacatagaggacacatgtaaggtggaaaatgtaagggcggaaagtaaccttatcacaaaggaatcttatcccccactacttatccttttatatttttccgtgtcatttttgcccttgagttttcctatataaggaaccaagttcggcatttgtgaaaacaagaaaaaatttggtgtaagctattttctttgaagtactgaggatacaacttcagagaaatttgtaagtttgtaggtaccagatctggatcccaaaccatgtctccggagaggagaccagttgagattaggccagctacagcagctgatatggccgcggtttgtgatatcgttaaccattacattgagacgtctacagtgaactttaggacagagccacaaacaccacaagagtggattgatgatctagagaggttgcaagatagatacccttggttggttgctgaggttgagggtgttgtggctggtattgcttacgctgggccctggaaggctaggaacgcttacgattggacagttgagagtactgtttacgtgtcacataggcatcaaaggttgggcctaggatctacattgtacacacatttgcttaagtctatggaggcgcaaggttttaagtctgtggttgctgttataggccttccaaacgatccatctgttaggttgcatgaggctttgggatacacagcccggggtacattgcgcgcagctggatacaagcatggtggatggcatgatgttggtttttggcaaagggattttgagttgccagctcctccaaggccagttaggccagttacccaaatctgagtagttagcttaatcacctagagctcgatcggcggcaatagcttcttagcgccatcccgggttgatcctatctgtgttgaaatagttgcggtgggcaaggctctctttcagaaagacaggcggccaaaggaacccaaggtgaggtgggctatggctctcagttccttgtggaagcgcttggtctaaggtgcagaggtgttagcgggatgaagcaaaagtgtccgattgtaacaagatatgttgatcctacgtaaggatattaaagtatgtattcatcactaatataatcagtgtattccaatatgtactacgatttccaatgtctttattgtcgccgtatgtaatcggcgtcacaaaataatccccggtgactttcttttaatccaggatgaaataatatgttattataatttttgcgatttggtccgttataggaattgaagtgtgcttgaggtcggtcgccaccactcccatttcataattttacatgtatttgaaaaataaaaatttatggtattcaatttaaacacgtatacttgtaaagaatgatatcttgaaagaaatatagtttaaatatttattgataaaataacaagtcaggtattatagtccaagcaaaaacataaatttattgatgcaagtttaaattcagaaatatttcaataactgattatatcagctggtacattgccgtagatgaaagactgagtgcgatattatggtgtaatacataggaattcgtttaaacgatctgcgtctaattttcggtccaacttgcacaggaaagacgtcgaccgcggtagctcttgcccagcagactgggcttccagtcctttcgctcgatcgggtccaatgttgtcctcagctgtgaaccggaagcggacgaccaacagtggaagaactgaaaggaacgagccgtctataccttgatgatcggcctctggtgaagggtatcatcgcagccaagcaagctcatgaaaggctgatgggggaggtgtataattatgaggcccacggcgggcttattctttagggaggatctatctcgttgctcaagtgcatggcgcaaagcagttattggagtgcggattttcgttggcatattattcgccacgagttagcagacgaagagaccttcatgaacgtggccaaggccagagttaagcagatgttacgccctgctgcaggcctttctattatccaatagttggttgatctttggaaagagcctcggctgaggcccatactgaaagagatcgatggatatcgatatgccatgttgtttgctagccagaaccagatcacatccgatatgctattgcagcttgacgcagatatggaggataagttgattcatgggatcgctcaggagtagctcatccatgcacgccgacaagaacagaaattccgtcgagttaacgcagccgcttacgacggattcgaaggtcatccattcggaatgtattagtttgcaccagctccgcgtcacacctgtcttcatttgaataagatgttagcaattgtttttagctttgtcttgttgtggcagggcggcaagtgcttcagacatcattctgttttcaaattttatgctggagaacagcttcttaattcctttggaaataatagactgcgtcttaaaattcagatgtctggatatagatatgattgtaaaataacctatttaagtgtcatttagaacataagttttatgaatgttcttccattttcgtcatcgaacgaataagagtaaatacaccttttttaacattacaaataagttcttatacgttgtttatacaccgggaatcatttccattattttcgcgcaaaagtcacggatattcgtgaaagcgacataaactgcgaaatttgcggggagtgtcttgagtttgcctcgaggctagcgcatgcacatagacacacacatcatctcattgatgcttggtaataattgtcattagattgtttttatgcatagatgcactcgaaatcagccaattttagacaagtatcaaacggatgtgacttcagtacattaaaaacgtccgcaatgtgttattaagttgtctaagcgtcaatttgatttacaattgaatatatcctgccccagccagccaacagctcgatttacaattgaatatatcctgccggccggcccacgcgtgtcgaggaattctgatctggcccccatttggacgtgaatgtagacacgtcgaaataaagatttccgaattagaataatttgtttattgctttcgcctataaatacgacggatcgtaatttgtcgttttatcaaaatgtactttcattttataataacgctgcggacatctacatttttgaattgaaaaaaaattggtaattactctttctttttctccatattgaccatcatactcattgctgatccatgtagatttcccggacatgaagccatttacaattgaatatatcctgccgccgctgccgctttgcacccggtggagcttgcatgttggtttctacgcagaactgagccggttaggcagataatttccattgagaactgagccatgtgcaccttccccccaacacggtgagcgacggggcaacggagtgatccacatgggacttttaaacatcatccgtcggatggcgttgcgagagaagcagtcgatccgtgagatcagccgacgcaccgggcaggcgcgcaacacgatcgcaaagtatttgaacgcaggtacaatcgagccgacgttcacgcggaacgaccaagcaagcttggctgccatttttggggtgaggccgttcgcggccgaggggcgcagcccctggggggatgggaggcccgcgttagcgggccgggagggttcgagaagggggggcaccccccttcggcgtgcgcggtcacgcgcacagggcgcagccctggttaaaaacaaggtttataaatattggtttaaaagcaggttaaaagacaggttagcggtggccgaaaaacgggcggaaacccttgcaaatgctggattttctgcctgtggacagcccctcaaatgtcaataggtgcgcccctcatctgtcagcactctgcccctcaagtgtcaaggatcgcgcccctcatctgtcagtagtcgcgcccctcaagtgtcaataccgcagggcacttatccccaggcttgtccacatcatctgtgggaaactcgcgtaaaatcaggcgttttcgccgatttgcgaggctggccagctccacgtcgccggccgaaatcgagcctgcccctcatctgtcaacgccgcgccgggtgagtcggcccctcaagtgtcaacgtccgcccctcatctgtcagtgagggccaagttttccgcgaggtatccacaacgccggcggccgcggtgtctcgcacacggcttcgacggcgtttctggcgcgtttgcagggccatagacggccgccagcccagcggcgagggcaaccagcccggtgagcgtcggaaagggtcgacggatcttttccgctgcataaccctgcttcggggtcattatagcgattttttcggtatatccatcctttttcgcacgatatacaggattttgccaaagggttcgtgtagactttccttggtgtatccaacggcgtcagccgggcaggataggtgaagtaggcccacccgcgagcgggtgttccttcttcactgtcccttattcgcacctggcggtgctcaacgggaatcctgctctgcgaggctggccggctaccgccggcgtaacagatgagggcaagcggatggctgatgaaaccaagccaaccaggaagggcagcccacctatcaaggtgtactgccttccagacgaacgaagagcgattgaggaaaaggcggcggcggccggcatgagcctgtcggcctacctgctggccgtcggccagggctacaaaatcacgggcgtcgtggactatgagcacgtccgcgagctggcccgcatcaatggcgacctgggccgcctgggcggcctgctgaaactctggctcaccgacgacccgcgcacggcgcggttcggtgatgccacgatcctcgccctgctggcgaagatcgaagagaagcaggacgagcttggcaaggtcatgatgggcgtggtccgcccgagggcagagccatgacttttttagccgctaaaacggccggggggtgcgcgtgattgccaagcacgtccccatgcgctccatcaagaagagcgacttcgcggagctggtattcgtgcagggcaagattcggaataccaagtacgagaaggacggccagacggtctacgggaccgacttcattgccgataaggtggattatctggacaccaaggcaccaggcgggtcaaatcaggaataagggcacattgccccggcgtgagtcggggcaatcccgcaaggagggtgaatgaatcggacgtttgaccggaaggcatacaggcaagaactgatcgacgcggggttttccgccgaggatgccgaaaccatcgcaagccgcaccgtcatgcgtgcgccccgcgaaaccttccagtccgtcggctcgatggtccagcaagctacggccaagatcgagcgcgacagcgtgcaactggctccccctgccctgcccgcgccatcggccgccgtggagcgttcgcgtcgtctcgaacaggaggcggcaggtttggcgaagtcgatgaccatcgacacgcgaggaactatgacgaccaagaagcgaaaaaccgccggcgaggacctggcaaaacaggtcagcgaggccaagcaggccgcgttgctgaaacacacgaagcagcagatcaaggaaatgcagctttccttgttcgatattgcgccgtggccggacacgatgcgagcgatgccaaacgacacggcccgctctgccctgttcaccacgcgcaacaagaaaatcccgcgcgaggcgctgcaaaacaaggtcattttccacgtcaacaaggacgtgaagatcacctacaccggcgtcgagctgcgggccgacgatgacgaactggtgtggcagcaggtgttggagtacgcgaagcgcacccctatcggcgagccgatcaccttcacgttctacgagctttgccaggacctgggctggtcgatcaatggccggtattacacgaaggccgaggaatgcctgtcgcgcctacaggcgacggcgatgggcttcacgtccgaccgcgttgggcacctggaatcggtgtcgctgctgcaccgcttccgcgtcctggaccgtggcaagaaaacgtcccgttgccaggtcctgatcgacgaggaaatcgtcgtgctgtttgctggcgaccactacacgaaattcatatgggagaagtaccgcaagctgtcgccgacggcccgacggatgttcgactatttcagctcgcaccgggagccgtacccgctcaagctggaaaccttccgcctcatgtgcggatcggattccacccgcgtgaagaagtggcgcgagcaggtcggcgaagcctgcgaagagttgcgaggcagcggcctggtggaacacgcctgggtcaatgatgacctggtgcattgcaaacgctagggccttgtggggtcagttccggctgggggttcagcagccagcgctttactggcatttcaggaacaagcgggcactgctcgacgcacttgcttcgctcagtatcgctcgggacgcacggcgcgctctacgaactgccgataaacagaggattaaaattgacaattgtgattaaggctcagattcgacggcttggagcggccgacgtgcaggatttccgcgagatccgattgtcggccctgaagaaagctccagagatgttcgggtccgtttacgagcacgaggagaaaaagcccatggaggcgttcgctgaacggttgcgagatgccgtggcattcggcgcctacatcgacggcgagatcattgggctgtcggtcttcaaacaggaggacggccccaaggacgctcacaaggcgcatctgtccggcgttttcgtggagcccgaacagcgaggccgaggggtcgccggtatgctgctgcgggcgttgccggcgggtttattgctcgtgatgatcgtccgacagattccaacgggaatctggtggatgcgcatcttcatcctcggcgcacttaatatttcgctattctggagcttgttgtttatttcggtctaccgcctgccgggcggggtcgcggcgacggtaggcgctgtgcagccgctgatggtcgtgttcatctctgccgctctgctaggtagcccgatacgattgatggcggtcctgggggctatttgcggaactgcgggcgtggcgctgttggtgttgacaccaaacgcagcgctagatcctgtcggcgtcgcagcgggcctggcgggggcggtttccatggcgttcggaaccgtgctgacccgcaagtggcaacctcccgtgcctctgctcacctttaccgcctggcaactggcggccggaggacttctgctcgttccagtagctttagtgtttgatccgccaatcccgatgcctacaggaaccaatgttctcggcctggcgtggctcggcctgatcggagcgggtttaacctacttcctttggttccgggggatctcgcgactcgaacctacagttgtttccttactgggctttctcagcccccgagcgcttagtgggaatttgtaccccttatcgaaccgggagcacaggatgacgcctaacaattcattcaagccgacaccgcttcgcggcgcggcttaattcaggagttaaacatcatgagggaagcggtgatcgccgaagtatcgactcaactatcagaggtagttggcgtcatcgagcgccatctcgaaccgacgttgctggccgtacatttgtacggctccgcagtggatggcggcctgaagccacacagtgatattgatttgctggttacggtgaccgtaaggcttgatgaaacaacgcggcgagctttgatcaacgaccttttggaaacttcggcttcccctggagagagcgagattctccgcgctgtagaagtcaccattgttgtgcacgacgacatcattccgtggcgttatccagctaagcgcgaactgcaatttggagaatggcagcgcaatgacattcttgcaggtatcttcgagccagccacgatcgacattgatctggctatcttgctgacaaaagcaagagaacatagcgttgccttggtaggtccagcggcggaggaactctttgatccggttcctgaacaggatctatttgaggcgctaaatgaaaccttaacgctatggaactcgccgcccgactgggctggcgatgagcgaaatgtagtgcttacgttgtcccgcatttggtacagcgcagtaaccggcaaaatcgcgccgaaggatgtcgctgccgactgggcaatggagcgcctgccggcccagtatcagcccgtcatacttgaagctaggcaggcttatcttggacaagaagatcgcttggcctcgcgcgcagatcagttggaagaatttgttcactacgtgaaaggcgagatcaccaaggtagtcggcaaataatgtctaacaattcgttcaagccgacgccgcttcgcggcgcggcttaactcaagcgttagagagctggggaagactatgcgcgatctgttgaaggtggttctaagcctcgtcttgcgatggcatttcgatccattcccattccgcgctcaagatggcttcccctcggcagttcatcagggctaaatcaatctagccgacttgtccggtgaaatgggctgcactccaacagaaacaatcaaacaaacatacacagcgacttattcacacgagctca

SEQ ID NO: 60 - DNA, 36517 bp, Artificial sequence
  plasmid pDAB108209
aattacaacggtatatatcctgccagtcagcatcatcacaccaaaagttaggcccgaatagtttgaaattagaaagctcgcaattgaggtctacaggccaaattcgctcttagccgtacaatattactcaccggatcctaaccggtttaattaaggcgcgccatgcccgggcaagcggccgcacaagtttgtacaaaaaagcaggcttctagacctaggtggagtcatcacgcagactatctcagcatgtgcgtagcacgcggccgcatcagtaagtgcatataaagaaagtaataagtagatgagtttggtaattacatgagatcgacagaggaattacgacgttcttgccatcaaaaagagattccaaatttgtaaagagccatatgtttgttgggcaattgagattgagtcttgccaatccttctttggaagttgacaatttaaaaattcgaagccagatttactcctaattaattattgagcttgaagtcttaattaccgattacatctctgagcagtagtagtcgatgatctttcccggtcactaattttactcaagcgaatcgatttttactttagtttagctaaccgtacgccattacagtttagagagcagcaagggtaagaacattattaaaacataaagtaaacctctcatttattacggtgtagtgctaattacattagcctcaaacatcctaagcttacagttttataaaacacacacgatgactgtgtatagtattaacatacatcaatagcaacactcatgatcatcgtgctaggccgggcttggactgggtgacctaagtgattaagctaactactcagaacgcaagtgagtctgtcgcaatgacagaggcttgaacatcaatgaagagatcaccttgttcgttgtggaactgaagtgcatgtttgtgctggctatgtccaccactctgattggatctgagggtgatgtagaagggtttgtcttgtgggaccggtctgtgttggactatcctctgaatggagttcgggagtgcagcttgtcccagcgttctcctcacccagaccaacattgcttgaaaggcaagatcattgacaaagggatcatgtgcatcagtgtcagttgcaaactctcctctggctgcatctgatccaggaacagcagaacacttggcaacaagctggctcttggtgcagctgagaacgtcatcaatgcctctgaacgcaggaccatgaaagagagtcttgccatcatagactgacccttgcaaagcaggatctgcatcaaggctcggaggctgcatggttgcattggcaggtggagcaccttggttggacaacactatgacagctctgtaggctggaacaagttttccacttgagaacgtcttgagcgtcgcttggacattcaccctcccactcggagcagtggacggtgtgagggtcacttcacagttgacgtctccatcaacagtgacacctttgaagagctgtgcgtcatctatggcccagagagagtagccagggaagagtccaaggcaggtctcagcaaggctcccaatagcaagggtcattggcaacacccttctgccttgtatgacatgatcctccaagaagggattggacttggcactgatctttctatgcagggtgatcgtgtcacttccaactttcttggatggtgtcctccagtttccaacaaggatctcagcaggacttgatcccaacacaatcctcgcaactgtatcagcacctccttcacgaggaatgatctgaactcccatttcttgaaactgtttcttgagttgaggtgtcaccatcccaccatcccagggaccaaagcagatggacttgacactgacatccttcgcaagttccaaacccatcttgttgagagcttcgtttgccatcgcatagtcagactgaccaacattgccgtggaaaccagcaagggagctgaagagaaccatgtgtttgaggttggcacgatcaactgcagccagaagattctccaacccagtgactttggtcccaaagacagcatcaaactcgtcagggagtttcttctctatgagacgatcacggagcacaccagaagcgtgaacgattccactaactctggcaccaagctgggactctgcatccctaactgctttggcaacatctgcagcagagttcacatcacaagagctgtagatcgctttgccacccagagcttcaatggcagcaatggagcttctcacttcacgagcaccaagaacagatcccacaagtttcgtgacagcccttggagtgggtttgggtccttcaccagcactgaaggccctcttcaactcttgggtggcagctttctgcacagccttctcatcagtgatgccagcacaccatgctggttcagacgcagaaactttgctacgacccaacagaatgtacttgcctccagcaatctgacgcgtgatctcacggatgcaaagaggtgtgatcccacgagcacctccagaaaccagaagcacatcgtctttcgctatctgtctctgagggttcccagtctccaacttggcagctctgattgtgcatctttgctggtttgctccaatcccaacctctctgattctgatgtcagcacacgccatctccctaactatggcaactgcagcatcttctgggtgcatcccttgagcaatgtccacaccacggctgaacacatcagattctgaccactccaaccctattgtcttgcagagtccaaagatcgctccacgctgtgctctcttgagtgcgtcagaagtgccttgagaggtgaatccaagtctgccgtcaagcctagccacaccgatgaaggcaggacgacctccagccacagcagtgcagagagaggctttggcaaacttcgcacacatgagtgtgaaacccagtatctcagctggttcaaacctttctgcttgctggcttatgaagcctcccaacgctccaaatctttgctcagcctctttgatggccttctcagctgattctgctgaaaggtccttagccagaacatgacgaatggcagctgcaccagctctctgagccaactgcaatccctcaaaggtcaagacaactgcacaggctcccaacaccctcacaagagcaagtgtcaactctgagccatcgtcaacgacaagaactggacggttctccggtctttccagaatcagttcatctggccttctgatgtcaaccacctttgcgtgcatcagtgacaaatcgtcacagtcagcaccatgaactgaatcaatcttcacagctggtgcagcaccggcacttgcaggagcggctgcagccggagcaggggctgatccaccagctatctcagccttcatggcatcgaccacttctccaaccgttctggtccttgacaaagcatcgacatctttggcctcaacgttcagcatggcttgaacctcagaaaggatttccacacgcttgatgctatcaatcccaagctctgtttccaactccatgtctgactctatcatgtcagtctcgtatccagtctttgcagccaaaacctccatcacaacagtttcagctttttcaaggagttcgttgctgacagctggtgccgcggcagcgggagcaggagcggctgcagctggcgcaggagcagaacccccagctatctcagccttcatggcatcaaccacctctcccaccgtccttgttctggaaagagcatcaacatctttggcctccacattcaacatcgcttgaacctcagagaggatttcaacacgtttgatggagtcaattccaagctcggtctccagttccatgtcagattcaatcatgtcggtctcatagccagttttcgcagcaaggacttccatcacaactgtctcagccttttccaggagttctgaggagacggccggtgcggctgcagctggagccggtgccgcggctgcgggtgcaggagcggctgcagctggcgcaggcgcggaacttccagcgatctccgccttcatcgcatcaacgacctcaccaactgttctggtccttgagagggcatccacatccttagcctccacattgagcattgcttggacttcactgaggatctcaacacgcttgatgctgtcaatgcccaattccgtctcaagttccatgtcagactcaatcatgtcagtctcatagccggtttttgcagccagcacttccatgacaactgtttcagccttctcaagcaattcgttgctgacagctggtgccgcggctgcgggtgcaggtgcggcagctgccggcgcaggagcagagcctccagcaatctcagccttcatcgcatcgacaacttcccccacagttcttgtcctactgagtgcatcaacatctttagcctcaacgttgagcatggcttgcacctcagagaggatctccactctcttgatggaatctattccaagttcggtctccaattccatgtctgactcaatcatgtccgtttcgtaaccagtttttgcagcaaggacttccatcacaactgtttcggctttctccagcaactcattgctgacggcaggagcggctgcagctggagcaggtgccgcggcagcaggtgcaggtgcggctgcagctggcgcactagcagagcttccggcaatttcagccttcatggcgtccacgacctcaccgactgttctggttcttgaaagcgcatcgacatcttttgcctccacgttcaacatagcttggacctcagacaagatttcaacacgtttgatgctatctattcccaactcggtttcaagctccatgtcactttcaatcatgtcggtctcgtaaccagtcttagctgcgagcacctccatcacaaccgtctcggccttttccaggagttcggatgaaacagctggcgcgggcgcggccggtgctggtgcagctggagctggagctgcggctgccggtgcaggtgccgcggcagctggcgcaggcgcgctccctccagcaatctccgccttcatggcatccacaacctcacccactgtccttgttcttgaaagtgcatcaacatccttagcttcaacattgagcatggcttggacttcactcaggatctccactcttttgatggaatcgatcccaagctctgtctccaattccatatcagattcaatcatgtcggtctcatagccagtctttgcagccaaaacctccatcacaaccgtctcagccttctccaagagttctgaagaaacggcaggtgcaggtgcagctggagcaggtgccgcggctgcgggtgcaggagcggctgcagctggcgcgggcgcagaccctccagcaatttcagccttcatggcatccacaacctcaccaacggtcctcgttctggacagagcatcaacatccttcgcttccacgttcagcatagcttggacctcactgaggatttcaacacgtttgatgctgtctatcccaagttctgtctccaattccatgtcagactcaatcatgtcagtctcatagccggttttagctgccaagacctccatcacgacggtctcagctttttcaaggagttcgtttgagacggccggagcggctgcagctggagctggagccgcggcagcgggaccaggagcggcagcggccggcgcaggagcggagcctccagctatctcagccttcatggcattgacaacctcaccgacagttctggtccttgagagagcatccacatccttagcttccacattgagcatggcttggacttcactgaggatttccacacgcttgatggaatcaattccaagctccgtctcaagctccatgtctgattctatcatgtcagtttcgtagccagttttggcagcaaggacttccatcacaacagtttctgccttttcgagcagctcattagaaacagctggtgcagctgcagctggagccgctttagccggtgcaggtgcggcagctgccggcgccggagcggaagaaccagcgatttctgccttcatagcgttgacaacttcacccactgttctcgtcctagagagagcatcaacatctttcgcctcaacgttaagcatagcttggacttcagaaagaatttcaaccctcttgatgctgtcaattcccaactcagtctcaagctccatgtccgcctcaatcatgtctgtttcgtatccagtcttggcagcgagaacctccatcacaactgtctcagctttctcaagcaactcgttggacacggcgggagcaggagcacttgcaacgggagcggcaggggcagcggctttaacaggcgccggagcagtctgttgctgttgctgttgctgaagggaagaagcatcaacacttccataaccatccagctcagccagcatggacttgaggatggcacgatgtttctccacaacagcagtgtcaactgcaggcttggctgaagctgcagcagtcttggcttcctccttggcagcagcaagtttggagttggcttctgcagctgcacgtttggcgtcgtcaagctgcctctgagcgtcttgaagctccttctgaagcctttcagcctccctcttggcagcttcgtcaaccacaggttcaggagccttgatgagtggtgcagcacccttgaggtatgtgacacatcttccgtcgttcatggcagcatccctcactttcttggtcttgtcactgacataggtggcagctgaaagtctgagtgtggttctctttttcttgatggcttgcatcctcgtggcatcaggagcatcccacttgtcaaacccttgaagattgacaccagccacaaccagctgaactgcagcatccctcaactgtatgtcagagtccgtgccagaagctgggttcacagacactgtgacaacagacgggtcatctttgagggtttcagaaacaagtttgctgagaacttgtttcggtccaaactcaacaaagattctcgcaccagcttggtgcatgttcctcacttgggtcaggaacttcacagatgaggtcatgtgttgagtgagcatctctctggcatccgtcggataggtctctccagaaacattgctgaagagctttgtttctgctttgggtgtacggaaggaaaccttggatatgacatctttgaaagctgagctggcattttccatctgtggagaatggaaggcagactcacaagcaagaggcacaactctgaacccttccttctgcaatctggcactttcagcttgaatcccttcaacagacccagtaatgacagtctgagacggagagtttgagtttccaagccagacgttggcagcttgaaccttgatgttctctgcgttgggtcctatgacagctgccatgcaacctttgggtgtggcaggtgcatctttgcctcccatgatccttgcccttctgcaaacaagttcaaacaactcatctctgtcaacacaaccagctgcatagagcgcagcaaactcacccaagctgtgtccagctgcaaagtctggagtgaatccagcttccttgaaaatctcaaaggcaccaagagcacatgccagggttgacggctggctgtatgctgtgagtgagattttcttgtgatcttgttctggctcacgttcgtacggtttccttgggtacaggacttgagagactctttcaaagtctttgtcacttccagcaaccttggactgtgcagcgtccattgcagcaatggactgtctgaactgaggccagttcatcgcaacttcactgaacatgtgtgtgtactgagcaccttgtccagagaagagtgcagcaacagcaccattggtggcaatgcctttggcacggaaagaaactccttctctcggaagcctccacgcttctttggtcacatctttggcaaactgagcacatatagcacgaagcgtggagcacgcatcctccgcatctttgaccaagaatcccagtctcgcattggtcgcaggtatgctcccagggaacttgaactgttctccaaacttgacacacttgatgtaggcagtattcttgactgtctcattctccttgatcgcagcttcaaactctttcagctgagcttcacaaaggctctgcaacgcagcaggagttgcagccatcatcaacaccggttgtggacgtttgttgagtctgtacgctgtcgtgtgctctggttcagcctcttccaacactgcatggtagttggcacctccaaagccaaagctggatattccagcacgtctcggaacaccaggtggagggaaccagggtctgttcatcgtgttgatgtagagggatgactcattgatgggagtgttgtcatagagattgggtggattgtccacattgatcgttccaggcaaagtcttgtgtttgagagccatgatgaccttgatcattccagcaagaccagcaacagccttcaaatgaccaatactggacttgatacttccaactgcaactttctctgtgttcccttcaccatacgctttgtcaaacaagttcctcaacgcagtcaactcaatcctatctccaactggagtgccagtcccatgaccctcaaccaaagtgacagtggcagggtcaacgcaggcacgattgtatgcacgtctcaaggcttcctcttgaccactgattgtgggagtgtagatgccagctgctttgccatcacttgagcttgcacaaccacgaatcacagcatgaatctcatcaccatccctcactgcatctgcataacgtttgagcaccaacatggctgatccctcaccaatgagcatccctttcgttttctcatcatacgctctcacacttgggtccgtgctgaacacaggtgtctttgagaaagccatgtacatcccaatggagttgtctgtgcaggttgcaccagtgaccatcatgtcgcagtcaccatagagcagttcatcaatcgcaaccttgactgctatcaaggagcttgcacatgcagcatccacaacgcagttcatgccatccaagttgaatgtgttggtgcatctgccagcagtgacattcccaaggaatccagggaaagagtcaagtctccattctgggaagttcgctttgtacttctccacagccactttgacatcttcctctggcatccccatctttctcaagactttctccacaaccacatagttgagtctgctgtagaactcatgtgaactcttctgtccacctccaatgccaagcacgcatcctatgtttttcttctcctttccaagtgcatcaatcccagcatcttgaagtgcttctttgaccttgagaagtgagatggtctgattcgcatcagaatcttccatctggaacatgttgagaccaaactcacgcgcatcaaagtcatactcaggaatgaaacctcctctcttgcagtagattttgtcctttgtggtcttgactgggtcaaagtacgcagtcacatcaacacgatcctcaggaagatcagacaggcaatcaatgccagcccttatggtctcccatgactctctcaccgtggttccacaaggaagtatggcgctcatgcctatgatcgcaatcctcgtgtccatctcacctcctttctgctcttgcagcctcgctgccatttttggttgtggatccgttttgctatttgtgtatgttttcttgttttggtttgagtttaaccatcattctcttctctctatttatagagagaagaggttggcacgcagcactgcgacatgagagaaagacacgggtgaagaggcgggagctgaggtggcagcatgcatgcatgcatggccagtcgtgtcatagtgagaagaggagaaagctgaggtggcaacgtgtatggccagtggtgtcatagtgtgaaagctgacgtggcagcatgcatggtgagtgtgaaaaaggcgccacagtgcagatgttactgaacaaaagcggtgtgccatgcaacttttgcccatcgtcgtctttctcatccaagttcctctttataatatcttttaccaaatcatattttaatataaattcattttatttttaaataaagtaatattatatccataaatattaactctcatttaacacattttcaaatttaacacttctgtaaataaatttattaacaaaaacttgtaaatatgttcaaataaatccataaatattaactttcattttattaacaaaaaaatctttactataagctgcggccgcttaattaagatgagtgatactcaggactcaggactcactctgctgatcactagtgctagcctcgaggtcgacacaactttgtatacaaaagttgtctaggatctgcttttacatgcgagacacatcttctaaagtaattttaataatagttactatattcaagatttcatatatcaaatactcaatattacttctaaaaaattaattagatataattaaaatattacttttttaattttaagtttaattgttgaatttgtgactattgatttattattctactatgtttaaattgttttatagatagtttaaagtaaatataagtaatgtagtagagtgttagagtgttaccctaaaccataaactataagatttatggtggactaattttcatatatttcttattgcttttaccttttcttggtatgtaagtccgtaactggaattactgtgggttgccatgacactctgtggtcttttggttcatgcatggatcttgcgcaagaaaaagacaaagaacaaagaaaaaagacaaaacagagagacaaaacgcaatcacacaaccaactcaaattagtcactggctgatcaagatcgccgcgtccatgtatgtctaaatgccatgcaaagcaacacgtgcttaacatgcactttaaatggctcacccatctcaacccacacacaaacacattgcctttttcttcatcatcaccacaaccacctgtatatattcattctcttccgccacctcaatttcttcacttcaacacacgtcaacctgcatatgcgtgtcatcccatgcccaaatctccatgcatgttccaaccaccttctctcttatataatacctataaatacctctaatatcactcacttctttcatcatccatccatccagagtactactactctactactataataccccaacccaactcatattcaatactactctaggatccacaaccaaaaatgcttcagcacacttggcttccgaagcctcccaatctgaccctcttgtcagatgaggttcatctctggaggattcctcttgaccagcctgagtcacaacttcaagaccttgctgccaccctgagcagtgatgaattggcgagggcaaacagattctactttccagaacacagaaggcgtttcactgctgggagaggcatcctcagatccatcttgggtggatacttgggagtggaaccgggtcaagtcaagtttgattatgagtcccgtgggaaaccgatccttggtgacagatttgctgagagtggactcctgttcaacttgtctcacagccagaaccttgccttgtgtgctgtcaactacacgcgtcaaataggcattgatcttgaatatctgcgtccaacatctgacttggagtctcttgcaaagaggttctttctcccaagagaatatgaactcttgaggtcactccctgatgagcagaaacagaagattttctttcgttactggacttgcaaagaggcttatctcaaagcaacgggagatggaatagccaaacttgaagagatcgagatagcactcaccccaacagaacctgccaagctccaaacagctcctgcgtggtctctgttggagcttgtgccagatgacaattgtgttgcagctgtggctgttgcgggttttggttggcagcccaagttctggcattactgagtagttagcttaatcacttaggtcacctcgagtatcaaaatctatttagaaatacacaatattttgttgcaggcttgctggagaatcgatctgctatcataaaaattacaaaaaaattttatttgcctcaattattttaggattggtattaaggacgcttaaattatttgtcgggtcactacgcatcattgtgattgagaagatcagcgatacgaaatattcgtagtactatcgataatttatttgaaaattcataagaaaagcaaacgttacatgaattgatgaaacaatacaaagacagataaagccacgcacatttaggatattggccgagattactgaatattgagtaagatcacggaatttctgacaggagcatgtcttcaattcagcccaaatggcagttgaaatactcaaaccgccccatatgcaggagcggatcattcattgtttgtttggttgcctttgccaacatgggagtccaaggttggcgcgccgaattcgcggccgcttaattaactactgtcactgaggccgtagacgagtacggactgatctaactagaaccggtgactactctacagccttggattaggcacggcatcgcgatctcttgggccgttgacttttaacttgcgatgacttttctaatttacgagtcaataaccattctccctcagatattgacttgttcgtagataagtgtcactttggaagctagcattacgagtacacgggtcggcaacttgcaaatcgtcgaaaattgctatgcaagttgatctctgatttggtagtacactcagctttgtgatcagccaatactcattacgtggtttattagcaaaatgaatcgacatgagccacagcgagtgacaccagttacgattccctcacaacctccgtctcgtgaaacgtaatagatcagcgttgtatgatgtaagatattgtagttttggatgtcaacgtagggtcgtgaagaggtttattaactcacatgttggaacccttagtgagttttcactttacaaatcacgcgtgccactacgtattacttcatcgtagatagggacaacacagaaacgaaagtgcgaaacctttacatcaccaggtcccaggcgagattcccaggggtgactaaaagtacgcatttgaaaactatgggggctattgaatctaaacatcagatagtcaccatgatcaatatccccgttacgcttgcttcgtaatctgggggagtagccgcttcccgcgcttacgagcgtgctcaagggccatacaaactgaccccagtgagccgttcagagtgcgtgccattgagaattggcgtacttctgttgaaaaaagtgcgataacgctcttcagggtggtcgataacccaagcgtagaatcacactttgcagaggatatgaggttcttaactaggatacttggggcgatcatcaagtaaggatgaagtcgcgtacgtactttctacatgctcagctaaagtgcaagcgggggacatgacgagatgattccaggaatcggggacattggcttagggcttatagatgtcttgttcgataacaccggtggatccccgggtaccgagctcgaattcctcgaccaacttttctatacaaagttgtctagacctaggactaggcactgagtgactcactgacctgactgagtgactggcggccgcatcagtaagtgcatataaagaaagtaataagtagatgagtttggtaattacatgagatcgacagaggaattacgacgttcttgccatcaaaaagagattccaaatttgtaaagagccatatgtttgttgggcaattgagattgagtcttgccaatccttctttggaagttgacaatttaaaaattcgaagccagatttactcctaattaattattgagcttgaagtcttaattaccgattacatctctgagcagtagtagtcgatgatctttcccggtcactaattttactcaagcgaatcgatttttactttagtttagctaaccgtacgccattacagtttagagagcagcaagggtaagaacattattaaaacataaagtaaacctctcatttattacggtgtagtgctaattacattagcctcaaacatcctaagcttacagttttataaaacacacacgatgactgtgtatagtattaacatacatcaatagcaacactcatgatcatcgtgctaggccgggcttggactgggtgacctaagtgattaagctaactactcaaagcgcattcgttggctcatagacaaaggcagcatcttcagtctcaagatcaatcctcggatcatttctcagagcattaagacgcctcaggtaacatgcaccacgcaaaatctgaaggttgatctggacaacacatgggtactcattagagacagcaggatcaagatatgttcctttgatgaagtcattgaaggctccaatggctggaccacaccagacttgatagtccatgacacgatcaggagcacccatgttggcccaacgtgatgcaagaccaagataccatctgaaacacaaagacatcttgagtttggggtcatgttccgctctctgtatcttctctggattcttcaaaccattgatgtaaaagtccttggtctcttcccagacctcttgaagtgccctcttgaagatcctcttctcgatcctttcaagttcagcaggaggcattgaatcgaaagagtcgtacttgcaaaagagttcgtacaatttgttagctcttgatgggaacattgttcccttcttgagaacttggagtttcacaccttcctcaaacatatcagctgctggagccatgcaaatgtcactgtaggtggcttgactgagttgttttctcacgttgtcacatgtcccggactgtttagcaacttgattgacagtcccagtcactatgaaggcagctcccattgtgagggcagccgcagcagcttgtgggcagccaacaccgcctccagctccaactctgactctaaggtgcgcaggataaccacactctctgtgcagtctgttcctaaggttgatgatcaaaggcaagatgacgtggatgggacggttgtcagtgtgaccaccagaatcagcttcaacagcgatgtcgtctgcgacaggaacacgacgggcaagttcggcttgttcttgtgttatctcaccagaagctatgagtttctcaaggaggtgttccggagccggtctgatgaacatttcggcgagttctgttctggacacttttccaatgatacggtttctgatgttgacactcccatcagcgttccttgagagtccggctgcacggtaacgaacaacttggggagtgagggtcatgaatgcagaagcctccaccacagtaacgcccttttcgaggaagagatcaacattccccttttccaagttgctgtcaaaaggtgaatgaatgaggttcacagcatatggtccttgaggcagagccgcttgtatcttctccaaagctgccctcacatggtgcattggaagcccacccgctccaaaagaacccaatatcttcctcttcccagcagcaatgacaaggtccgcagacgcaattcccttggccattgctccagtgtacagaggtgctgacacattgtacgtttccatgaaggacttgtcaccaagatcacttatggagcatggtttgatactgacaatccttgaagaagttgcaggtttggattcaaactgcaccaaattggagttttcaacaccaagatacaatggattgtccacttcaagcaggacatctctcaactgagtcggactgagtgcaactccagttttcccagggtccgcttttgcgctgggtggctgttgttgaacatccggaatggcttgaggttttgcactgacaacacgaactctgagttctttggcttcatacacacggagaccatcaacccaaagtgctccatctgccactatgtcaacgtagcctccattttcaggagaggctgtgattgaaactatgtgcacctcacagtccatcgcacggttctttggtgtcaattgaccacggtacttccacgccgtttttccaggggcatgggcaaaggtcggattgctcacattgtattctcccggtatgttctggtccaccgcaaatgcctcaatgagctggaacattgactcaattcccaaagatccaggcatcacaggatcaaaccaaaagtgacaagagaagaaccagtcttgtgggttaacatctttgtgtccatgcgcatatcctttcccatgcagcccagaatcaggagcaatgttgaggtaatccaaatactcacactgttctgaccttctgagaacttgagcattagttgcatctggaagtttctcagtcagctgttctttgcctttggctgatgcgatttcaactcttctcacactcgtgttgttagttttgcaccaaggctccgtctttttcccattgtcaagtccagcttgctgagcaaacacctctggagtgaaccatccaaaggaagtgcttcctttgtagaaaaccacgccatcaacagacaactcaaacgtgaatctgtgaatccccatctttcccaacattgcatatccagtgcacttggtcacattccttatggttttccccctcacatccacatctggcctcaccatttcagcacttgcatcaaggttcctaaagagaatgtcatctttgtccatcgtcagtggtgctttcaacacactggtgagaacaccggatgtctgaagtccgatttccatgatgatggaataaggcatgtgcccatcattgcaagaaccatcaaagaaccacgcatcttgaggacagtcaaactcccccaccattgtgcctttgctgggattgcaatcaacattcaggaacttgccatgttccatgtttgtgacttcaacaactctagtcacaagagccaaatcaaaagcagggcttctgctcgtatttgacttatcaaatcttgcgaactctggtcccaagcagttgctaacttttccacacatgaactctgacatgttgtaccagttcagaggcatttctccagctttgcaattgttgtcaagtgggttgccagggaaagggatgaagcaaattgccctcggagggtaagaactaggggagaagaacggcgtcgggttgccaggaagttttgacatgggatgccaggacatttctttcggagcgagagcgtcacccttgaggatatgttcaggaagtgcaactggctttggcgcaagaacatctgctgagaaagcaggcttcgcaggggcagcagaagcactagcactggcaccagagctggccttggacgcttccggtcccacagtggctgcaccgttagcaaaaacgggctgaactttggaggggttcttgttcgtggatctcttctgcatcttgagagcaatgcccttgaagtccacgacgatctttttgttaagatccccctttccgtagtcgctgattctatcaaggctgaaatcttgacccttttcgaaatcaacgtcaatgatgttgacgtcagcaatggcgtacggatcgttatcctcgtcgaatcccatctctttgatctccatgacgtagaccaactttcccttatgaggagatatctgacccctacacctaactttgttcgggtgtccgttgacgggtctgaagtcaaatggtccggtggtaaggtgcaaaccgagccagatcatgtacatcttgagcatttgtgaacaaccgtcgctgacaagagatccagccatgacttgatccttaacaaaatggcatgggaagtaccaatggtccctctccaagattttctcaccaaccaactgacccaaaccgtacacacctcccttatggtcaatgctggtgactctatcaatcatgagcatcttacgtgcgcagagtttgtagttgatctccggcatgccattctttgagccaaaaacggaagcccaatctttgtcaaccaaggtctgcatctccttttcgttgagttttgttttgtgaaggcagggagcgacagcatagggagaaacatcttgctttggaatcttagctctggcagccaaatcccctcttgtgaacaccacaccctttcccgcatcaagctcctcatttgtgaagaagccagcacagccatctctcatctcaatgagaagcctcccattgacatagcagtcatactcaaagaagaacatggagatgccaccatccaaacgtttggcaaaaccggtcactctgatgtcatactcaagggtctctccctcatgggcaaccccatagaatgtcaacgtggtgttgagcagacggtaaactctgtcaccttggttctggaaatcaattcccatgtatgatatcagcatcaaatcgcactgtccactctcaaccagaactgcccagggacaatcacctccctcagacaattcgccattcactggaagatcatactcagtgaccattctggcaccaactctgtagttgttgacctcggcatccatgagtgtgacccttgtcacaagcaggtattcacgagcaggcagcctcacccttctggggtacttgtctatgacagcaaactccggaccaaaaaccttagctatgtcaccctctgcaaactccaggagttcctcatagttgaacacctcagttttgccagaggtcagttcctccttggtcatctcccaacatggcttcttgttggtcttgacacgaagcgccatttttggttgtggatccgttttgctatttgtgtatgttttcttgttttggtttgagtttaaccatcattctcttctctctatttatagagagaagaggttggcacgcagcactgcgacatgagagaaagacacgggtgaagaggcgggagctgaggtggcagcatgcatgcatgcatggccagtcgtgtcatagtgagaagaggagaaagctgaggtggcaacgtgtatggccagtggtgtcatagtgtgaaagctgacgtggcagcatgcatggtgagtgtgaaaaaggcgccacagtgcagatgttactgaacaaaagcggtgtgccatgcaacttttgcccatcgtcgtctttctcatccaagttcctctttataatatcttttaccaaatcatattttaatataaattcattttatttttaaataaagtaatattatatccataaatattaactctcatttaacacattttcaaatttaacacttctgtaaataaatttattaacaaaaacttgtaaatatgttcaaataaatccataaatattaactttcattttattaacaaaaaaatctttactataagctgcggccgcttaattaatcacgagtggatgactgtcacgactgactcatgactgactactagtgctagcctcgaggtcgacacaactttgtataataaagttgtctagtctgcttttacatgcgagacacatcttctaaagtaattttaataatagttactatattcaagatttcatatatcaaatactcaatattacttctaaaaaattaattagatataattaaaatattacttttttaattttaagtttaattgttgaatttgtgactattgatttattattctactatgtttaaattgttttatagatagtttaaagtaaatataagtaatgtagtagagtgttagagtgttaccctaaaccataaactataagatttatggtggactaattttcatatatttcttattgcttttaccttttcttggtatgtaagtccgtaactggaattactgtgggttgccatgacactctgtggtcttttggttcatgcatggatcttgcgcaagaaaaagacaaagaacaaagaaaaaagacaaaacagagagacaaaacgcaatcacacaaccaactcaaattagtcactggctgatcaagatcgccgcgtccatgtatgtctaaatgccatgcaaagcaacacgtgcttaacatgcactttaaatggctcacccatctcaacccacacacaaacacattgcctttttcttcatcatcaccacaaccacctgtatatattcattctcttccgccacctcaatttcttcacttcaacacacgtcaacctgcatatgcgtgtcatcccatgcccaaatctccatgcatgttccaaccaccttctctcttatataatacctataaatacctctaatatcactcacttctttcatcatccatccatccagagtactactactctactactataataccccaacccaactcatattcaatactactctaggatccacaaccaaaaatggctgcaaggaacgtgagtgcggctcatgagatgcatgacgagaagaggatagctgttgtgggcatggctgttcagtatgctggatgcaaaacgaaagacgagttctgggaagttctcatgaatggaaaagttgagagcaaagtgatcagcgacaaacgtcttggttcaaattaccgtgctgaacactacaaagctgaaaggagcaagtatgctgacaccttctgcaatgagacatatggaactcttgatgagaacgaaatagacaatgagcatgaactccttttgaaccttgccaaacaagccttggctgaaacatctgtcaaagattcaacaagatgtggcatagtttctggatgcctcagcttcccgatggacaacctccaaggtgaactcttgaatgtgtaccagaaccatgttgagaagaaacttggtgccagagttttcaaagatgcctctcactggtcagaaagagaacagtccaacaaaccagaggctggtgacagaagaatcttcatggaccctgcttcctttgttgctgaggaactcaatcttggcgctctccactactctgttgatgctgcctgtgccactgcgctctatgtgctcagactggcgcaagatcacttggtctctggtgcagctgatgtgatgctttgtggtgcaacatgcctgccggagccgtttttcatactctctgggttctcaaccttccaagccatgcctgttggaacgggtcagaatgtgtccatgccgctgcacaaagattctcaaggattgacccctggtgaaggaggttccatcatggtcctcaaacgtttggatgacgcaatcagagatggagatcacatctatggaacacttttgggagccaatgtcagcaacagtggcactggtctgccacttaaaccccttttgccgtcagagaaaaagtgcctcatggacacctacacacgtatcaatgtgcatccccacaagattcagtatgttgaatgccatgcaactgggactccacaaggtgatcgtgtggaaattgatgctgtgaaggcttgctttgaaggcaaagtcccacgttttggaaccacaaaagggaactttggacacacattggtggcagctgggtttgctggcatgtgcaaagtgcttctctccatgaagcacgggatcattccacccactccgggaatagatgacgaaacgaagatggaccctctggttgtctctggtgaggccattccctggccagaaacgaatggagaaccgaagcgtgctggtctctcagcgtttggatttggtgggaccaatgctcatgctgtctttgaggaacatgacccaagcaatgctgcatgcactggccatgactccatttctgctctctctgcacgttgtggtggtgagtcaaacatgagaatagcaatcactgggatggatgccacttttggtgctttgaaaggattggatgcttttgaaagggccatctacactggtgctcatggtgctataccactcccagaaaagagatggagattcctggggaaagacaaggacttccttgatctttgtggagtcaaagcaacaccgcatggctgttacattgaagatgttgaagttgatttccagaggctgaggactccaatgactcctgaagatatgctcttgcctcaacagcttctggctgtcaccacaattgatagggccatattggactctggcatgaagaaaggtggaaatgtggctgtctttgtggggttggggaccgatcttgaactctaccgtcaccgtgcaagggttgctctcaaggagagagtgaggcctgaagccagcaagaaactcaatgacatgatgcagtacatcaatgattgtgggacaagcacttcttacaccagctacataggcaacttggttgcaacaagggtcagttcacaatggggcttcacgggaccttccttcacaatcacagaaggcaacaattctgtgtacagatgtgctgaacttggcaaatacctcttggaaacgggagaggttgatggggttgtggttgcgggtgttgatctctgtgggagtgctgagaacctttacgtcaagtcaaggcgtttcaaggtgtctacatctgacaccccgagagccagctttgatgcagctgctgatggttactttgttggagagggctgtggtgcatttgtgctcaagcgtgagacaagctgcaccaaggatgacagaatctatgcttgcatggatgccatagttcctggaaatgttccatctgcatgtttgagagaggcattggatcaagccagagtcaagcctggagacatcgagatgttggagctttctgctgattcagcgaggcatttgaaggacccgtctgttctcccaaaggaactcactgctgaggaagagattggcggacttcagacgattcttcgtgacgatgacaagctcccaaggaatgttgcaactggaagtgtcaaggccactgttggtgacactggttatgcttctggtgctgccagtttgattaaggctgcgctttgcatctacaaccgttacctgcccagcaatggagatgactgggatgaacctgcacctgaagcaccctgggacagcacactctttgcgtgccagacctcaagagcttggttgaagaaccctggtgagagacgttatgcggctgtttccggagtcagtgaaaccagaagttgctacagtgtgctgctttctgaagcagagggacactacgagagagagaacagaatcagtttggatgaggaagcacccaagctcattgtgttgagagcagactcccatgaagagattcttggaagattggacaagataagggaaaggttcttgcagcccacgggtgctgcacccagagagtctgaattgaaggcgcaagcccgtaggatctttcttgaactccttggtgagacccttgcccaagatgcagcttcatctggaagtcagaagccccttgctctcagcttggtctccactccatccaagctccagagagaggtggaacttgcggcaaaaggcattccgagatgtctcaagatgagacgtgattggagttcccctgctggaagcagatatgcgcctgagcctttggccagtgacagagttgccttcatgtatggagaaggaaggagcccttactatggcatcacacaagacattcataggatttggcctgaacttcatgaggtcatcaatgagaaaacaaaccgtctctgggctgaaggtgacagatgggtcatgccaagggccagcttcaagagtgagcttgagtcacaacagcaagagtttgacagaaacatgattgaaatgttccgtcttggaatcctcacctcaattgccttcacaaacctggcgagagatgttctcaacatcacgcccaaagcagcctttggactcagtttgggagagatttccatgatctttgctttctccaagaaaaacggtttgataagcgatcagttgacaaaggatttgagagagtcagatgtctggaacaaagctctggctgttgagttcaatgcgctcagagaagcctggggcattccacagtctgtcccaaaagatgagttctggcaaggttacatagtgaggggaacgaaacaagacatagaagcagccatagcaccagactcaaagtatgtgaggttgaccatcatcaatgatgccaacactgctctcatcagtggaaagcctgatgcatgcaaagctgcgattgctcgtcttggtggcaacatccctgcgcttccagtcactcaaggcatgtgtgggcattgcccagaggtgggaccttacaccaaggacatcgcaaagatccacgccaaccttgagttccctgtggttgatggtcttgatctctggactaccataaaccagaagaggcttgtgccaagagccacgggtgccaaagatgaatgggctccttcatcctttggggagtatgctggacagctctatgagaaacaagccaacttccctcagatagttgaaaccatctacaagcagaactatgatgtgtttgttgaagttgggccaaacaatcacagaagcacagcagtgagaaccacgcttggaccacagagaaaccaccttgctggtgccatagacaagcagaacgaggatgcttggacgacaatagtcaagctcgtggcttcattgaaggctcaccttgttcctggagtgaccatcagtccgctctaccactccaagctcgttgcagaggctgaggcttgttatgctgcgctctgtaaaggtgagaaacccaagaaaaacaagtttgtgagaaagattcagttgaatggcagattcaacagcaaggcagaccccatctcctcagcagaccttgcatccttcccacctgcggaccctgcgattgaagctgccatctcttcaaggatcatgaagcctgtggctccgaaattctatgcgcgtctcaacattgatgagcaagatgagaccagagatccgatcttgaacaaggacaatgcgccttccagctccagctcttccagcagttcctcttccagcagttcatctccgtctcctgctccttcagctccagttcagaagaaagctgccccagctgcggagacaaaagctgttgccagtgctgatgcacttcgtagtgccctgcttgatcttgactccatgcttgcgctcagctctgcaagtgcttctggcaaccttgttgagactgcgccatctgatgccagtgtcattgtccctccgtgcaacattgctgatcttggcagcagagctttcatgaaaacttatggtgtttctgcgcctctgtacaccggtgcaatggccaagggaattgcctctgcggacttggtgatcgcagctggaaggcaaggaatccttgcgtcatttggtgctggaggccttccaatgcaagttgtgcgtgagtccattgaaaagattcaagctgccctgcccaatggaccatatgctgtcaacctcatccattctccttttgacagcaaccttgagaagggaaatgttgatctcttcttggaaaagggtgtcacttttgttgaggcttcagccttcatgacgttgacaccgcaagttgtcagatacagagcggctgggttgacgaggaatgcagatgggtcagtcaacataaggaacagaatcattgggaaagtctccagaactgagctggctgaaatgttcatgcgtcctgcacctgagcatcttttgcagaagctcattgcttctggggagatcaatcaagaacaagctgagttggccagacgtgttcctgtggctgatgacattgcggttgaagctgattctggtggacacactgacaaccgtccaatccatgtcattctgcctctgattatcaacctgagggataggcttcacagagagtgtggatacccagcaaacctgagggttcgtgttggtgctgggggtggcattgggtgtccccaagctgcgctggcaactttcaacatgggtgcctctttcattgtcactggaacagtgaaccaagttgccaaacaatctgggacgtgtgacaatgtgaggaaacagcttgcgaaagcaacttactcagatgtttgcatggcaccggcagctgacatgtttgaggaaggtgtgaaacttcaagttttgaagaaaggaacaatgttcccttcaagagccaacaaactctatgagttgttctgcaagtatgattcttttgagtccatgcctccagcagagcttgcgagggttgagaaaagaatcttcagtcgtgcattggaagaggtctgggatgagaccaagaacttctacatcaaccgtctccacaacccagagaagatacagagggctgagagggaccccaaactgaagatgtcactgtgtttcagatggtatctgtccctggcttcaaggtgggccaacactggagcttctgacagagtcatggactaccaagtttggtgtggtcctgccattggttcattcaatgatttcatcaaaggaacttaccttgatccggcagtggcaaatgagtacccgtgtgttgtgcagatcaacaaacagattcttagaggagcgtgcttcttgaggcgtcttgaaatactgagaaatgcaaggctttcagatggtgcagctgcacttgtggcgagcattgatgacacatatgtccctgctgagaagctgtgagtagttagcttaatcacttaggtcacctcgagtatcaaaatctatttagaaatacacaatattttgttgcaggcttgctggagaatcgatctgctatcataaaaattacaaaaaaattttatttgcctcaattattttaggattggtattaaggacgcttaaattatttgtcgggtcactacgcatcattgtgattgagaagatcagcgatacgaaatattcgtagtactatcgataatttatttgaaaattcataagaaaagcaaacgttacatgaattgatgaaacaatacaaagacagataaagccacgcacatttaggatattggccgagattactgaatattgagtaagatcacggaatttctgacaggagcatgtcttcaattcagcccaaatggcagttgaaatactcaaaccgccccatatgcaggagcggatcattcattgtttgtttggttgcctttgccaacatgggagtccaaggttggcgcgccgaattcgcggccgcttaattaatctgacctgaccactagacctgagtgagtacagatgtgctactagtgctagcctcgaggtcgacacccagctttcttgtacaaagtggttgcggccgcttaattaaatttaaattcaattaatgcaatcttgattttcaacaacgaaggtaatggcgtaaaagaaaaaatgtatgttattgtattgatctttcatgatgttgaagcgtgccataatatgatgatgtataattaaaatattaactgtcgcattttattgaaatggcactgttatttcaaccatatctttgattctgttacatgacacgactgcaagaagtaaataatagacgccgttgttaaagaattgctatcatatgtgcctaactagagggaatttgagcgtcagacctaatcaaatattacaaaatatctcactctgtcgccagcaatggtgtaatcagcgcagacaaatggcgtaaagatcgcggaaaaacctccccgagtggcatgatagctgcctctgtattgctgatttagtcagccttatttgacttaagggtgccctcgttagtgacaaattgctttcaaggagacagccatgccccacactttgttgaaaaacaaattgcctttggggagacggtaaagccagttgctcttcaataaggaatgtcgaggaggcaatgtaaccgcctctggtagtacacttctctaatccaaaaatcaatttgtattcaagataccgcaaaaaacttatggtttaaaccctgcaggactagtccagaaggtaattatccaagatgtagcatcaagaatccaatgtttacgggaaaaactatggaagtattatgtaagctcagcaagaagcagatcaatatgcggcacatatgcaacctatgttcaaaaatgaagaatgtacagatacaagatcctatactgccagaatacgaagaagaatacgtagaaattgaaaaagaagaaccaggcgaagaaaagaatcttgaagacgtaagcactgacgacaacaatgaaaagaagaagataaggtcggtgattgtgaaagagacatagaggacacatgtaaggtggaaaatgtaagggcggaaagtaaccttatcacaaaggaatcttatcccccactacttatccttttatatttttccgtgtcatttttgcccttgagttttcctatataaggaaccaagttcggcatttgtgaaaacaagaaaaaatttggtgtaagctattttctttgaagtactgaggatacaacttcagagaaatttgtaagtttgtaggtaccagatctggatcccaaaccatgtctccggagaggagaccagttgagattaggccagctacagcagctgatatggccgcggtttgtgatatcgttaaccattacattgagacgtctacagtgaactttaggacagagccacaaacaccacaagagtggattgatgatctagagaggttgcaagatagatacccttggttggttgctgaggttgagggtgttgtggctggtattgcttacgctgggccctggaaggctaggaacgcttacgattggacagttgagagtactgtttacgtgtcacataggcatcaaaggttgggcctaggatctacattgtacacacatttgcttaagtctatggaggcgcaaggttttaagtctgtggttgctgttataggccttccaaacgatccatctgttaggttgcatgaggctttgggatacacagcccggggtacattgcgcgcagctggatacaagcatggtggatggcatgatgttggtttttggcaaagggattttgagttgccagctcctccaaggccagttaggccagttacccaaatctgagtagttagcttaatcacctagagctcgatcggcggcaatagcttcttagcgccatcccgggttgatcctatctgtgttgaaatagttgcggtgggcaaggctctctttcagaaagacaggcggccaaaggaacccaaggtgaggtgggctatggctctcagttccttgtggaagcgcttggtctaaggtgcagaggtgttagcgggatgaagcaaaagtgtccgattgtaacaagatatgttgatcctacgtaaggatattaaagtatgtattcatcactaatataatcagtgtattccaatatgtactacgatttccaatgtctttattgtcgccgtatgtaatcggcgtcacaaaataatccccggtgactttcttttaatccaggatgaaataatatgttattataatttttgcgatttggtccgttataggaattgaagtgtgcttgaggtcggtcgccaccactcccatttcataattttacatgtatttgaaaaataaaaatttatggtattcaatttaaacacgtatacttgtaaagaatgatatcttgaaagaaatatagtttaaatatttattgataaaataacaagtcaggtattatagtccaagcaaaaacataaatttattgatgcaagtttaaattcagaaatatttcaataactgattatatcagctggtacattgccgtagatgaaagactgagtgcgatattatggtgtaatacataggaattcgtttaaacgatctgcgtctaattttcggtccaacttgcacaggaaagacgtcgaccgcggtagctcttgcccagcagactgggcttccagtcctttcgctcgatcgggtccaatgttgtcctcagctgtgaaccggaagcggacgaccaacagtggaagaactgaaaggaacgagccgtctataccttgatgatcggcctctggtgaagggtatcatcgcagccaagcaagctcatgaaaggctgatgggggaggtgtataattatgaggcccacggcgggcttattctttagggaggatctatctcgttgctcaagtgcatggcgcaaagcagttattggagtgcggattttcgttggcatattattcgccacgagttagcagacgaagagaccttcatgaacgtggccaaggccagagttaagcagatgttacgccctgctgcaggcctttctattatccaatagttggttgatctttggaaagagcctcggctgaggcccatactgaaagagatcgatggatatcgatatgccatgttgtttgctagccagaaccagatcacatccgatatgctattgcagcttgacgcagatatggaggataagttgattcatgggatcgctcaggagtagctcatccatgcacgccgacaagaacagaaattccgtcgagttaacgcagccgcttacgacggattcgaaggtcatccattcggaatgtattagtttgcaccagctccgcgtcacacctgtcttcatttgaataagatgttagcaattgtttttagctttgtcttgttgtggcagggcggcaagtgcttcagacatcattctgttttcaaattttatgctggagaacagcttcttaattcctttggaaataatagactgcgtcttaaaattcagatgtctggatatagatatgattgtaaaataacctatttaagtgtcatttagaacataagttttatgaatgttcttccattttcgtcatcgaacgaataagagtaaatacaccttttttaacattacaaataagttcttatacgttgtttatacaccgggaatcatttccattattttcgcgcaaaagtcacggatattcgtgaaagcgacataaactgcgaaatttgcggggagtgtcttgagtttgcctcgaggctagcgcatgcacatagacacacacatcatctcattgatgcttggtaataattgtcattagattgtttttatgcatagatgcactcgaaatcagccaattttagacaagtatcaaacggatgtgacttcagtacattaaaaacgtccgcaatgtgttattaagttgtctaagcgtcaatttgatttacaattgaatatatcctgccccagccagccaacagctcgatttacaattgaatatatcctgccggccggcccacgcgtgtcgaggaattctgatctggcccccatttggacgtgaatgtagacacgtcgaaataaagatttccgaattagaataatttgtttattgctttcgcctataaatacgacggatcgtaatttgtcgttttatcaaaatgtactttcattttataataacgctgcggacatctacatttttgaattgaaaaaaaattggtaattactctttctttttctccatattgaccatcatactcattgctgatccatgtagatttcccggacatgaagccatttacaattgaatatatcctgccgccgctgccgctttgcacccggtggagcttgcatgttggtttctacgcagaactgagccggttaggcagataatttccattgagaactgagccatgtgcaccttccccccaacacggtgagcgacggggcaacggagtgatccacatgggacttttaaacatcatccgtcggatggcgttgcgagagaagcagtcgatccgtgagatcagccgacgcaccgggcaggcgcgcaacacgatcgcaaagtatttgaacgcaggtacaatcgagccgacgttcacgcggaacgaccaagcaagcttggctgccatttttggggtgaggccgttcgcggccgaggggcgcagcccctggggggatgggaggcccgcgttagcgggccgggagggttcgagaagggggggcaccccccttcggcgtgcgcggtcacgcgcacagggcgcagccctggttaaaaacaaggtttataaatattggtttaaaagcaggttaaaagacaggttagcggtggccgaaaaacgggcggaaacccttgcaaatgctggattttctgcctgtggacagcccctcaaatgtcaataggtgcgcccctcatctgtcagcactctgcccctcaagtgtcaaggatcgcgcccctcatctgtcagtagtcgcgcccctcaagtgtcaataccgcagggcacttatccccaggcttgtccacatcatctgtgggaaactcgcgtaaaatcaggcgttttcgccgatttgcgaggctggccagctccacgtcgccggccgaaatcgagcctgcccctcatctgtcaacgccgcgccgggtgagtcggcccctcaagtgtcaacgtccgcccctcatctgtcagtgagggccaagttttccgcgaggtatccacaacgccggcggccgcggtgtctcgcacacggcttcgacggcgtttctggcgcgtttgcagggccatagacggccgccagcccagcggcgagggcaaccagcccggtgagcgtcggaaagggtcgacggatcttttccgctgcataaccctgcttcggggtcattatagcgattttttcggtatatccatcctttttcgcacgatatacaggattttgccaaagggttcgtgtagactttccttggtgtatccaacggcgtcagccgggcaggataggtgaagtaggcccacccgcgagcgggtgttccttcttcactgtcccttattcgcacctggcggtgctcaacgggaatcctgctctgcgaggctggccggctaccgccggcgtaacagatgagggcaagcggatggctgatgaaaccaagccaaccaggaagggcagcccacctatcaaggtgtactgccttccagacgaacgaagagcgattgaggaaaaggcggcggcggccggcatgagcctgtcggcctacctgctggccgtcggccagggctacaaaatcacgggcgtcgtggactatgagcacgtccgcgagctggcccgcatcaatggcgacctgggccgcctgggcggcctgctgaaactctggctcaccgacgacccgcgcacggcgcggttcggtgatgccacgatcctcgccctgctggcgaagatcgaagagaagcaggacgagcttggcaaggtcatgatgggcgtggtccgcccgagggcagagccatgacttttttagccgctaaaacggccggggggtgcgcgtgattgccaagcacgtccccatgcgctccatcaagaagagcgacttcgcggagctggtattcgtgcagggcaagattcggaataccaagtacgagaaggacggccagacggtctacgggaccgacttcattgccgataaggtggattatctggacaccaaggcaccaggcgggtcaaatcaggaataagggcacattgccccggcgtgagtcggggcaatcccgcaaggagggtgaatgaatcggacgtttgaccggaaggcatacaggcaagaactgatcgacgcggggttttccgccgaggatgccgaaaccatcgcaagccgcaccgtcatgcgtgcgccccgcgaaaccttccagtccgtcggctcgatggtccagcaagctacggccaagatcgagcgcgacagcgtgcaactggctccccctgccctgcccgcgccatcggccgccgtggagcgttcgcgtcgtctcgaacaggaggcggcaggtttggcgaagtcgatgaccatcgacacgcgaggaactatgacgaccaagaagcgaaaaaccgccggcgaggacctggcaaaacaggtcagcgaggccaagcaggccgcgttgctgaaacacacgaagcagcagatcaaggaaatgcagctttccttgttcgatattgcgccgtggccggacacgatgcgagcgatgccaaacgacacggcccgctctgccctgttcaccacgcgcaacaagaaaatcccgcgcgaggcgctgcaaaacaaggtcattttccacgtcaacaaggacgtgaagatcacctacaccggcgtcgagctgcgggccgacgatgacgaactggtgtggcagcaggtgttggagtacgcgaagcgcacccctatcggcgagccgatcaccttcacgttctacgagctttgccaggacctgggctggtcgatcaatggccggtattacacgaaggccgaggaatgcctgtcgcgcctacaggcgacggcgatgggcttcacgtccgaccgcgttgggcacctggaatcggtgtcgctgctgcaccgcttccgcgtcctggaccgtggcaagaaaacgtcccgttgccaggtcctgatcgacgaggaaatcgtcgtgctgtttgctggcgaccactacacgaaattcatatgggagaagtaccgcaagctgtcgccgacggcccgacggatgttcgactatttcagctcgcaccgggagccgtacccgctcaagctggaaaccttccgcctcatgtgcggatcggattccacccgcgtgaagaagtggcgcgagcaggtcggcgaagcctgcgaagagttgcgaggcagcggcctggtggaacacgcctgggtcaatgatgacctggtgcattgcaaacgctagggccttgtggggtcagttccggctgggggttcagcagccagcgctttactggcatttcaggaacaagcgggcactgctcgacgcacttgcttcgctcagtatcgctcgggacgcacggcgcgctctacgaactgccgataaacagaggattaaaattgacaattgtgattaaggctcagattcgacggcttggagcggccgacgtgcaggatttccgcgagatccgattgtcggccctgaagaaagctccagagatgttcgggtccgtttacgagcacgaggagaaaaagcccatggaggcgttcgctgaacggttgcgagatgccgtggcattcggcgcctacatcgacggcgagatcattgggctgtcggtcttcaaacaggaggacggccccaaggacgctcacaaggcgcatctgtccggcgttttcgtggagcccgaacagcgaggccgaggggtcgccggtatgctgctgcgggcgttgccggcgggtttattgctcgtgatgatcgtccgacagattccaacgggaatctggtggatgcgcatcttcatcctcggcgcacttaatatttcgctattctggagcttgttgtttatttcggtctaccgcctgccgggcggggtcgcggcgacggtaggcgctgtgcagccgctgatggtcgtgttcatctctgccgctctgctaggtagcccgatacgattgatggcggtcctgggggctatttgcggaactgcgggcgtggcgctgttggtgttgacaccaaacgcagcgctagatcctgtcggcgtcgcagcgggcctggcgggggcggtttccatggcgttcggaaccgtgctgacccgcaagtggcaacctcccgtgcctctgctcacctttaccgcctggcaactggcggccggaggacttctgctcgttccagtagctttagtgtttgatccgccaatcccgatgcctacaggaaccaatgttctcggcctggcgtggctcggcctgatcggagcgggtttaacctacttcctttggttccgggggatctcgcgactcgaacctacagttgtttccttactgggctttctcagcccccgagcgcttagtgggaatttgtaccccttatcgaaccgggagcacaggatgacgcctaacaattcattcaagccgacaccgcttcgcggcgcggcttaattcaggagttaaacatcatgagggaagcggtgatcgccgaagtatcgactcaactatcagaggtagttggcgtcatcgagcgccatctcgaaccgacgttgctggccgtacatttgtacggctccgcagtggatggcggcctgaagccacacagtgatattgatttgctggttacggtgaccgtaaggcttgatgaaacaacgcggcgagctttgatcaacgaccttttggaaacttcggcttcccctggagagagcgagattctccgcgctgtagaagtcaccattgttgtgcacgacgacatcattccgtggcgttatccagctaagcgcgaactgcaatttggagaatggcagcgcaatgacattcttgcaggtatcttcgagccagccacgatcgacattgatctggctatcttgctgacaaaagcaagagaacatagcgttgccttggtaggtccagcggcggaggaactctttgatccggttcctgaacaggatctatttgaggcgctaaatgaaaccttaacgctatggaactcgccgcccgactgggctggcgatgagcgaaatgtagtgcttacgttgtcccgcatttggtacagcgcagtaaccggcaaaatcgcgccgaaggatgtcgctgccgactgggcaatggagcgcctgccggcccagtatcagcccgtcatacttgaagctaggcaggcttatcttggacaagaagatcgcttggcctcgcgcgcagatcagttggaagaatttgttcactacgtgaaaggcgagatcaccaaggtagtcggcaaataatgtctaacaattcgttcaagccgacgccgcttcgcggcgcggcttaactcaagcgttagagagctggggaagactatgcgcgatctgttgaaggtggttctaagcctcgtcttgcgatggcatttcgatccattcccattccgcgctcaagatggcttcccctcggcagttcatcagggctaaatcaatctagccgacttgtccggtgaaatgggctgcactccaacagaaacaatcaaacaaacatacacagcgacttattcacacgagctca

SEQ ID NO: 61 - DNA, 36590 bp, Artificial sequence
  plasmid pDAB9159
aattacaacggtatatatcctgccagtcagcatcatcacaccaaaagttaggcccgaatagtttgaaattagaaagctcgcaattgaggtctacaggccaaattcgctcttagccgtacaatattactcaccggatcctaaccggtttaattaaggcgcgccatgcccgggcaagcggccgcacaagtttgtacaaaaaagcaggcttctagacctaggtggagtcatcacgcagactatctcagcatgtgcgtagcacgcggccgcagcttatagtaaagatttttttgttaataaaatgaaagttaatatttatggatttatttgaacatatttacaagtttttgttaataaatttatttacagaagtgttaaatttgaaaatgtgttaaatgagagttaatatttatggatataatattactttatttaaaaataaaatgaatttatattaaaatatgatttggtaaaagatattataaagaggaacttggatgagaaagacgacgatgggcaaaagttgcatggcacaccgcttttgttcagtaacatctgcactgtggcgcctttttcacactcaccatgcatgctgccacgtcagctttcacactatgacaccactggccatacacgttgccacctcagctttctcctcttctcactatgacacgactggccatgcatgcatgcatgctgccacctcagctcccgcctcttcacccgtgtctttctctcatgtcgcagtgctgcgtgccaacctcttctctctataaatagagagaagagaatgatggttaaactcaaaccaaaacaagaaaacatacacaaatagcaaaacggatccacaaccaaaaatggcagcgaggctgcaagagcagaaaggaggtgagatggacacgaggattgcgatcataggcatgagcgccatacttccttgtggaaccacggtgagagagtcatgggagaccataagggctggcattgattgcctgtctgatcttcctgaggatcgtgttgatgtgactgcgtactttgacccagtcaagaccacaaaggacaaaatctactgcaagagaggaggtttcattcctgagtatgactttgatgcgcgtgagtttggtctcaacatgttccagatggaagattctgatgcgaatcagaccatctcacttctcaaggtcaaagaagcacttcaagatgctgggattgatgcacttggaaaggagaagaaaaacataggatgcgtgcttggcattggaggtggacagaagagttcacatgagttctacagcagactcaactatgtggttgtggagaaagtcttgagaaagatggggatgccagaggaagatgtcaaagtggctgtggagaagtacaaagcgaacttcccagaatggagacttgactctttccctggattccttgggaatgtcactgctggcagatgcaccaacacattcaacttggatggcatgaactgcgttgtggatgctgcatgtgcaagctccttgatagcagtcaaggttgcgattgatgaactgctctatggtgactgcgacatgatggtcactggtgcaacctgcacagacaactccattgggatgtacatggctttctcaaagacacctgtgttcagcacggacccaagtgtgagagcgtatgatgagaaaacgaaagggatgctcattggtgagggatcagccatgttggtgctcaaacgttatgcagatgcagtgagggatggtgatgagattcatgctgtgattcgtggttgtgcaagctcaagtgatggcaaagcagctggcatctacactcccacaatcagtggtcaagaggaagccttgagacgtgcatacaatcgtgcctgcgttgaccctgccactgtcactttggttgagggtcatgggactggcactccagttggagataggattgagttgactgcgttgaggaacttgtttgacaaagcgtatggtgaagggaacacagagaaagttgcagttggaagtatcaagtccagtattggtcatttgaaggctgttgctggtcttgctggaatgatcaaggtcatcatggctctcaaacacaagactttgcctggaacgatcaatgtggacaatccacccaatctctatgacaacactcccatcaatgagtcatccctctacatcaacacgatgaacagaccctggttccctccacctggtgttccgagacgtgctggaatatccagctttggctttggaggtgccaactaccatgcagtgttggaagaggctgaaccagagcacacgacagcgtacagactcaacaaacgtccacaaccggtgttgatgatggctgcaactcctgctgcgttgcagagcctttgtgaagctcagctgaaagagtttgaagctgcgatcaaggagaatgagacagtcaagaatactgcctacatcaagtgtgtcaagtttggagaacagttcaagttccctgggagcatacctgcgaccaatgcgagactgggattcttggtcaaagatgcggaggatgcgtgctccacgcttcgtgctatatgtgctcagtttgccaaagatgtgaccaaagaagcgtggaggcttccgagagaaggagtttctttccgtgccaaaggcattgccaccaatggtgctgttgctgcactcttctctggacaaggtgctcagtacacacacatgttcagtgaagttgcgatgaactggcctcagttcagacagtccattgctgcaatggacgctgcacagtccaaggttgctggaagtgacaaagactttgaaagagtctctcaagtcctgtacccaaggaaaccgtacgaacgtgagccagaacaagatcacaagaaaatctcactcacagcatacagccagccgtcaaccctggcatgtgctcttggtgcctttgagattttcaaggaagctggattcactccagactttgcagctggacacagcttgggtgagtttgctgcgctctatgcagctggttgtgttgacagagatgagttgtttgaacttgtttgcagaagggcaaggatcatgggaggcaaagatgcacctgccacacccaaaggttgcatggcagctgtcataggacccaacgcagagaacatcaaggttcaagctgccaacgtctggcttggaaactcaaactctccgtctcagactgtcattactgggtctgttgaagggattcaagctgaaagtgccagattgcagaaggaagggttcagagttgtgcctcttgcttgtgagtctgccttccattctccacagatggaaaatgccagctcagctttcaaagatgtcatatccaaggtttccttccgtacacccaaagcagaaacaaagctcttcagcaatgtttctggagagacctatccgacggatgccagagagatgctcactcaacacatgacctcatctgtgaagttcctgacccaagtgaggaacatgcaccaagctggtgcgagaatctttgttgagtttggaccgaaacaagttctcagcaaacttgtttctgaaaccctcaaagatgacccgtctgttgtcacagtgtctgtgaacccagcttctggcacggactctgacatacagttgagggatgctgcagttcagctggttgtggctggtgtcaatcttcaagggtttgacaagtgggatgctcctgatgccacgaggatgcaagccatcaagaaaaagagaaccacactcagactttcagctgccacctatgtcagtgacaagaccaagaaagtgagggatgctgccatgaacgacggaagatgtgtcacatacctcaagggtgctgcaccactcatcaaggctcctgaacctgtggttgacgaagctgccaagagggaggctgaaaggcttcagaaggagcttcaagacgctcagaggcagcttgacgacgccaaacgtgcagctgcagaagccaactccaaacttgctgctgccaaggaggaagccaagactgctgcagcttcagccaagcctgcagttgacactgctgttgtggagaaacatcgtgccatcctcaagtccatgctggctgagctggatggttatggaagtgttgatgcttcttcccttcagcaacagcaacagcaacagactgctccggcgcctgttaaagccgctgcccctgccgctcccgttgcaagtgctcctgctcccgccgtgtccaacgagttgcttgagaaagctgagacagttgtgatggaggttctcgctgccaagactggatacgaaacagacatgattgaggcggacatggagcttgagactgagttgggaattgacagcatcaagagggttgaaattctttctgaagtccaagctatgcttaacgttgaggcgaaagatgttgatgctctctctaggacgagaacagtgggtgaagttgtcaacgctatgaaggcagaaatcgctggttcttccgctccggcgccggcagctgccgcacctgcaccggctaaagcggctccagctgcagctgcaccagctgtttctaatgagctgctcgaaaaggcagaaactgttgtgatggaagtccttgctgccaaaactggctacgaaactgacatgatagaatcagacatggagcttgagacggagcttggaattgattccatcaagcgtgtggaaatcctcagtgaagtccaagccatgctcaatgtggaagctaaggatgtggatgctctctcaaggaccagaactgtcggtgaggttgtcaatgccatgaaggctgagatagctggaggctccgctcctgcgccggccgctgccgctcctggtcccgctgccgcggctccagctccagctgcagccgctccggccgtctcaaacgaactccttgaaaaagctgagaccgtcgtgatggaggtcttggcagctaaaaccggctatgagactgacatgattgagtctgacatggaattggagacagaacttgggatagacagcatcaaacgtgttgaaatcctcagtgaggtccaagctatgctgaacgtggaagcgaaggatgttgatgctctgtccagaacgaggaccgttggtgaggttgtggatgccatgaaggctgaaattgctggagggtctgcgcccgcgccagctgcagccgctcctgcacccgcagccgcggcacctgctccagctgcacctgcacctgccgtttcttcagaactcttggagaaggctgagacggttgtgatggaggttttggctgcaaagactggctatgagaccgacatgattgaatctgatatggaattggagacagagcttgggatcgattccatcaaaagagtggagatcctgagtgaagtccaagccatgctcaatgttgaagctaaggatgttgatgcactttcaagaacaaggacagtgggtgaggttgtggatgccatgaaggcggagattgctggagggagcgcgcctgcgccagctgccgcggcacctgcaccggcagccgcagctccagctccagctgcaccagcaccggccgcgcccgcgccagctgtttcatccgaactcctggaaaaggccgagacggttgtgatggaggtgctcgcagctaagactggttacgagaccgacatgattgaaagtgacatggagcttgaaaccgagttgggaatagatagcatcaaacgtgttgaaatcttgtctgaggtccaagctatgttgaacgtggaggcaaaagatgtcgatgcgctttcaagaaccagaacagtcggtgaggtcgtggacgccatgaaggctgaaattgccggaagctctgctagtgcgccagctgcagccgcacctgcacctgctgccgcggcacctgctccagctgcagccgctcctgccgtcagcaatgagttgctggagaaagccgaaacagttgtgatggaagtccttgctgcaaaaactggttacgaaacggacatgattgagtcagacatggaattggagaccgaacttggaatagattccatcaagagagtggagatcctctctgaggtgcaagccatgctcaacgttgaggctaaagatgttgatgcactcagtaggacaagaactgtgggggaagttgtcgatgcgatgaaggctgagattgctggaggctctgctcctgcgccggcagctgccgcacctgcacccgcagccgcggcaccagctgtcagcaacgaattgcttgagaaggctgaaacagttgtcatggaagtgctggctgcaaaaaccggctatgagactgacatgattgagtctgacatggaacttgagacggaattgggcattgacagcatcaagcgtgttgagatcctcagtgaagtccaagcaatgctcaatgtggaggctaaggatgtggatgccctctcaaggaccagaacagttggtgaggtcgttgatgcgatgaaggcggagatcgctggaagttccgcgcctgcgccagctgcagccgctcctgcacccgcagccgcggcaccggctccagctgcagccgcaccggccgtctcctcagaactcctggaaaaggctgagacagttgtgatggaagtccttgctgcgaaaactggctatgagaccgacatgattgaatctgacatggaactggagaccgagcttggaattgactccatcaaacgtgttgaaatcctctctgaggttcaagcgatgttgaatgtggaggccaaagatgttgatgctctttccagaacaaggacggtgggagaggtggttgatgccatgaaggctgagatagctgggggttctgctcctgcgccagctgcagccgctcctgctcccgctgccgcggcaccagctgtcagcaacgaactccttgaaaaagctgaaactgttgtgatggaggttttggctgcaaagactggatacgagactgacatgatagagtcagacatggagttggaaacagagcttgggattgatagcatcaagcgtgtggaaatcctttctgaggttcaagccatgctgaacgttgaggccaaagatgtcgatgctttgtcaaggaccagaacggttggagaagtggtcgatgccatgaaggctgagatagctggtggatcagcccctgctccggctgcagccgctcctgcaagtgccggtgctgcaccagctgtgaagattgattcagttcatggtgctgactgtgacgatttgtcactgatgcacgcaaaggtggttgacatcagaaggccagatgaactgattctggaaagaccggagaaccgtccagttcttgtcgttgacgatggctcagagttgacacttgctcttgtgagggtgttgggagcctgtgcagttgtcttgacctttgagggattgcagttggctcagagagctggtgcagctgccattcgtcatgttctggctaaggacctttcagcagaatcagctgagaaggccatcaaagaggctgagcaaagatttggagcgttgggaggcttcataagccagcaagcagaaaggtttgaaccagctgagatactgggtttcacactcatgtgtgcgaagtttgccaaagcctctctctgcactgctgtggctggaggtcgtcctgccttcatcggtgtggctaggcttgacggcagacttggattcacctctcaaggcacttctgacgcactcaagagagcacagcgtggagcgatctttggactctgcaagacaatagggttggagtggtcagaatctgatgtgttcagccgtggtgtggacattgctcaagggatgcacccagaagatgctgcagttgccatagttagggagatggcgtgtgctgacatcagaatcagagaggttgggattggagcaaaccagcaaagatgcacaatcagagctgccaagttggagactgggaaccctcagagacagatagcgaaagacgatgtgcttctggtttctggaggtgctcgtgggatcacacctctttgcatccgtgagatcacgcgtcagattgctggaggcaagtacattctgttgggtcgtagcaaagtttctgcgtctgaaccagcatggtgtgctggcatcactgatgagaaggctgtgcagaaagctgccacccaagagttgaagagggccttcagtgctggtgaaggacccaaacccactccaagggctgtcacgaaacttgtgggatctgttcttggtgctcgtgaagtgagaagctccattgctgccattgaagctctgggtggcaaagcgatctacagctcttgtgatgtgaactctgctgcagatgttgccaaagcagttagggatgcagagtcccagcttggtgccagagttagtggaatcgttcacgcttctggtgtgctccgtgatcgtctcatagagaagaaactccctgacgagtttgatgctgtctttgggaccaaagtcactgggttggagaatcttctggctgcagttgatcgtgccaacctcaaacacatggttctcttcagctcccttgctggtttccacggcaatgttggtcagtctgactatgcgatggcaaacgaagctctcaacaagatgggtttggaacttgcgaaggatgtcagtgtcaagtccatctgctttggtccctgggatggtgggatggtgacacctcaactcaagaaacagtttcaagaaatgggagttcagatcattcctcgtgaaggaggtgctgatacagttgcgaggattgtgttgggatcaagtcctgctgagatccttgttggaaactggaggacaccatccaagaaagttggaagtgacacgatcaccctgcatagaaagatcagtgccaagtccaatcccttcttggaggatcatgtcatacaaggcagaagggtgttgccaatgacccttgctattgggagccttgctgagacctgccttggactcttccctggctactctctctgggccatagatgacgcacagctcttcaaaggtgtcactgttgatggagacgtcaactgtgaagtgaccctcacaccgtccactgctccgagtgggagggtgaatgtccaagcgacgctcaagacgttctcaagtggaaaacttgttccagcctacagagctgtcatagtgttgtccaaccaaggtgctccacctgccaatgcaaccatgcagcctccgagccttgatgcagatcctgctttgcaagggtcagtctatgatggcaagactctctttcatggtcctgcgttcagaggcattgatgacgttctcagctgcaccaagagccagcttgttgccaagtgttctgctgttcctggatcagatgcagccagaggagagtttgcaactgacactgatgcacatgatccctttgtcaatgatcttgcctttcaagcaatgttggtctgggtgaggagaacgctgggacaagctgcactcccgaactccattcagaggatagtccaacacagaccggtcccacaagacaaacccttctacatcaccctcagatccaatcagagtggtggacatagccagcacaaacatgcacttcagttccacaacgaacaaggtgatctcttcattgatgttcaagcctctgtcattgcgacagactcacttgcgttctgagtagttagcttaatcacttaggtcacctttaaacggtcgcagcgtgtgcgtgtccgtcgtacgttctggccggccgggccttgggcgcgcgatcagaagcgttgcgttggcgtgtgtgtgcttctggtttgctttaattttaccaagtttgtttcaaggtggatcgcgtggtcaaggcccgtgtgctttaaagacccaccggcactggcagtgagtgttgctgcttgtgtaggctttggtacgtatgggctttatttgcttctggatgttgtgtactacttgggtttgttgaattattatgagcagttgcgtattgtaattcagctgggctacctggacattgttatgtattaataaatgctttgctttcttctaaagatctttaagtgctcggccggccttggccacggtggccagatccactagaggcgcgcctctagtgcggccgcttaattaagatgagtgatactcaggactcaggactcactctgctgatcactagtgctagcctcgaggtcgacacaactttgtatacaaaagttgtctagacctaggctcagcaactcatccagtcaagttcgagtcagtgagttgggcggccgcctcccagtatcattatagtgaaagttttggctctctcgccggtggttttttacctctatttaaaggggttttccacctaaaaattctggtatcattctcactttacttgttactttaatttctcataatctttggttgaaattatcacgcttccgcacacgatatccctacaaatttattatttgttaaacattttcaaaccgcataaaattttatgaagtcccgtctatctttaatgtagtctaacattttcatattgaaatatataatttacttaattttagcgttggtagaaagcataatgatttattcttattcttcttcatataaatgtttaatatacaatataaacaaattctttaccttaagaaggatttcccattttatattttaaaaatatatttatcaaatatttttcaaccacgtaaatctcataataataagttgtttcaaaagtaataaaatttaactccataatttttttattcgactgatcttaaagcaacacccagtgacacaactagccatttttttctttgaataaaaaaatccaattatcattgtattttttttatacaatgaaaatttcaccaaacaatgatttgtggtatttctgaagcaagtcatgttatgcaaaattctataattcccatttgacactacggaagtaactgaagatctgcttttacatgcgagacacatcttctaaagtaattttaataatagttactatattcaagatttcatatatcaaatactcaatattacttctaaaaaattaattagatataattaaaatattacttttttaattttaagtttaattgttgaatttgtgactattgatttattattctactatgtttaaattgttttatagatagtttaaagtaaatataagtaatgtagtagagtgttagagtgttaccctaaaccataaactataagatttatggtggactaattttcatatatttcttattgcttttaccttttcttggtatgtaagtccgtaactggaattactgtgggttgccatgacactctgtggtcttttggttcatgcatggatcttgcgcaagaaaaagacaaagaacaaagaaaaaagacaaaacagagagacaaaacgcaatcacacaaccaactcaaattagtcactggctgatcaagatcgccgcgtccatgtatgtctaaatgccatgcaaagcaacacgtgcttaacatgcactttaaatggctcacccatctcaacccacacacaaacacattgcctttttcttcatcatcaccacaaccacctgtatatattcattctcttccgccacctcaatttcttcacttcaacacacgtcaacctgcatatgcgtgtcatcccatgcccaaatctccatgcatgttccaaccaccttctctcttatataatacctataaatacctctaatatcactcacttctttcatcatccatccatccagagtactactactctactactataataccccaacccaactcatattcaatactactctaggatccacaaccaaaaatggctgcaaggaacgtgagtgcggctcatgagatgcatgacgagaagaggatagctgttgtgggcatggctgttcagtatgctggatgcaaaacgaaagacgagttctgggaagttctcatgaatggaaaagttgagagcaaagtgatcagcgacaaacgtcttggttcaaattaccgtgctgaacactacaaagctgaaaggagcaagtatgctgacaccttctgcaatgagacatatggaactcttgatgagaacgaaatagacaatgagcatgaactccttttgaaccttgccaaacaagccttggctgaaacatctgtcaaagattcaacaagatgtggcatagtttctggatgcctcagcttcccgatggacaacctccaaggtgaactcttgaatgtgtaccagaaccatgttgagaagaaacttggtgccagagttttcaaagatgcctctcactggtcagaaagagaacagtccaacaaaccagaggctggtgacagaagaatcttcatggaccctgcttcctttgttgctgaggaactcaatcttggcgctctccactactctgttgatgctgcctgtgccactgcgctctatgtgctcagactggcgcaagatcacttggtctctggtgcagctgatgtgatgctttgtggtgcaacatgcctgccggagccgtttttcatactctctgggttctcaaccttccaagccatgcctgttggaacgggtcagaatgtgtccatgccgctgcacaaagattctcaaggattgacccctggtgaaggaggttccatcatggtcctcaaacgtttggatgacgcaatcagagatggagatcacatctatggaacacttttgggagccaatgtcagcaacagtggcactggtctgccacttaaaccccttttgccgtcagagaaaaagtgcctcatggacacctacacacgtatcaatgtgcatccccacaagattcagtatgttgaatgccatgcaactgggactccacaaggtgatcgtgtggaaattgatgctgtgaaggcttgctttgaaggcaaagtcccacgttttggaaccacaaaagggaactttggacacacattggtggcagctgggtttgctggcatgtgcaaagtgcttctctccatgaagcacgggatcattccacccactccgggaatagatgacgaaacgaagatggaccctctggttgtctctggtgaggccattccctggccagaaacgaatggagaaccgaagcgtgctggtctctcagcgtttggatttggtgggaccaatgctcatgctgtctttgaggaacatgacccaagcaatgctgcatgcactggccatgactccatttctgctctctctgcacgttgtggtggtgagtcaaacatgagaatagcaatcactgggatggatgccacttttggtgctttgaaaggattggatgcttttgaaagggccatctacactggtgctcatggtgctataccactcccagaaaagagatggagattcctggggaaagacaaggacttccttgatctttgtggagtcaaagcaacaccgcatggctgttacattgaagatgttgaagttgatttccagaggctgaggactccaatgactcctgaagatatgctcttgcctcaacagcttctggctgtcaccacaattgatagggccatattggactctggcatgaagaaaggtggaaatgtggctgtctttgtggggttggggaccgatcttgaactctaccgtcaccgtgcaagggttgctctcaaggagagagtgaggcctgaagccagcaagaaactcaatgacatgatgcagtacatcaatgattgtgggacaagcacttcttacaccagctacataggcaacttggttgcaacaagggtcagttcacaatggggcttcacgggaccttccttcacaatcacagaaggcaacaattctgtgtacagatgtgctgaacttggcaaatacctcttggaaacgggagaggttgatggggttgtggttgcgggtgttgatctctgtgggagtgctgagaacctttacgtcaagtcaaggcgtttcaaggtgtctacatctgacaccccgagagccagctttgatgcagctgctgatggttactttgttggagagggctgtggtgcatttgtgctcaagcgtgagacaagctgcaccaaggatgacagaatctatgcttgcatggatgccatagttcctggaaatgttccatctgcatgtttgagagaggcattggatcaagccagagtcaagcctggagacatcgagatgttggagctttctgctgattcagcgaggcatttgaaggacccgtctgttctcccaaaggaactcactgctgaggaagagattggcggacttcagacgattcttcgtgacgatgacaagctcccaaggaatgttgcaactggaagtgtcaaggccactgttggtgacactggttatgcttctggtgctgccagtttgattaaggctgcgctttgcatctacaaccgttacctgcccagcaatggagatgactgggatgaacctgcacctgaagcaccctgggacagcacactctttgcgtgccagacctcaagagcttggttgaagaaccctggtgagagacgttatgcggctgtttccggagtcagtgaaaccagaagttgctacagtgtgctgctttctgaagcagagggacactacgagagagagaacagaatcagtttggatgaggaagcacccaagctcattgtgttgagagcagactcccatgaagagattcttggaagattggacaagataagggaaaggttcttgcagcccacgggtgctgcacccagagagtctgaattgaaggcgcaagcccgtaggatctttcttgaactccttggtgagacccttgcccaagatgcagcttcatctggaagtcagaagccccttgctctcagcttggtctccactccatccaagctccagagagaggtggaacttgcggcaaaaggcattccgagatgtctcaagatgagacgtgattggagttcccctgctggaagcagatatgcgcctgagcctttggccagtgacagagttgccttcatgtatggagaaggaaggagcccttactatggcatcacacaagacattcataggatttggcctgaacttcatgaggtcatcaatgagaaaacaaaccgtctctgggctgaaggtgacagatgggtcatgccaagggccagcttcaagagtgagcttgagtcacaacagcaagagtttgacagaaacatgattgaaatgttccgtcttggaatcctcacctcaattgccttcacaaacctggcgagagatgttctcaacatcacgcccaaagcagcctttggactcagtttgggagagatttccatgatctttgctttctccaagaaaaacggtttgataagcgatcagttgacaaaggatttgagagagtcagatgtctggaacaaagctctggctgttgagttcaatgcgctcagagaagcctggggcattccacagtctgtcccaaaagatgagttctggcaaggttacatagtgaggggaacgaaacaagacatagaagcagccatagcaccagactcaaagtatgtgaggttgaccatcatcaatgatgccaacactgctctcatcagtggaaagcctgatgcatgcaaagctgcgattgctcgtcttggtggcaacatccctgcgcttccagtcactcaaggcatgtgtgggcattgcccagaggtgggaccttacaccaaggacatcgcaaagatccacgccaaccttgagttccctgtggttgatggtcttgatctctggactaccataaaccagaagaggcttgtgccaagagccacgggtgccaaagatgaatgggctccttcatcctttggggagtatgctggacagctctatgagaaacaagccaacttccctcagatagttgaaaccatctacaagcagaactatgatgtgtttgttgaagttgggccaaacaatcacagaagcacagcagtgagaaccacgcttggaccacagagaaaccaccttgctggtgccatagacaagcagaacgaggatgcttggacgacaatagtcaagctcgtggcttcattgaaggctcaccttgttcctggagtgaccatcagtccgctctaccactccaagctcgttgcagaggctgaggcttgttatgctgcgctctgtaaaggtgagaaacccaagaaaaacaagtttgtgagaaagattcagttgaatggcagattcaacagcaaggcagaccccatctcctcagcagaccttgcatccttcccacctgcggaccctgcgattgaagctgccatctcttcaaggatcatgaagcctgtggctccgaaattctatgcgcgtctcaacattgatgagcaagatgagaccagagatccgatcttgaacaaggacaatgcgccttccagctccagctcttccagcagttcctcttccagcagttcatctccgtctcctgctccttcagctccagttcagaagaaagctgccccagctgcggagacaaaagctgttgccagtgctgatgcacttcgtagtgccctgcttgatcttgactccatgcttgcgctcagctctgcaagtgcttctggcaaccttgttgagactgcgccatctgatgccagtgtcattgtccctccgtgcaacattgctgatcttggcagcagagctttcatgaaaacttatggtgtttctgcgcctctgtacaccggtgcaatggccaagggaattgcctctgcggacttggtgatcgcagctggaaggcaaggaatccttgcgtcatttggtgctggaggccttccaatgcaagttgtgcgtgagtccattgaaaagattcaagctgccctgcccaatggaccatatgctgtcaacctcatccattctccttttgacagcaaccttgagaagggaaatgttgatctcttcttggaaaagggtgtcacttttgttgaggcttcagccttcatgacgttgacaccgcaagttgtcagatacagagcggctgggttgacgaggaatgcagatgggtcagtcaacataaggaacagaatcattgggaaagtctccagaactgagctggctgaaatgttcatgcgtcctgcacctgagcatcttttgcagaagctcattgcttctggggagatcaatcaagaacaagctgagttggccagacgtgttcctgtggctgatgacattgcggttgaagctgattctggtggacacactgacaaccgtccaatccatgtcattctgcctctgattatcaacctgagggataggcttcacagagagtgtggatacccagcaaacctgagggttcgtgttggtgctgggggtggcattgggtgtccccaagctgcgctggcaactttcaacatgggtgcctctttcattgtcactggaacagtgaaccaagttgccaaacaatctgggacgtgtgacaatgtgaggaaacagcttgcgaaagcaacttactcagatgtttgcatggcaccggcagctgacatgtttgaggaaggtgtgaaacttcaagttttgaagaaaggaacaatgttcccttcaagagccaacaaactctatgagttgttctgcaagtatgattcttttgagtccatgcctccagcagagcttgcgagggttgagaaaagaatcttcagtcgtgcattggaagaggtctgggatgagaccaagaacttctacatcaaccgtctccacaacccagagaagatacagagggctgagagggaccccaaactgaagatgtcactgtgtttcagatggtatctgtccctggcttcaaggtgggccaacactggagcttctgacagagtcatggactaccaagtttggtgtggtcctgccattggttcattcaatgatttcatcaaaggaacttaccttgatccggcagtggcaaatgagtacccgtgtgttgtgcagatcaacaaacagattcttagaggagcgtgcttcttgaggcgtcttgaaatactgagaaatgcaaggctttcagatggtgcagctgcacttgtggcgagcattgatgacacatatgtccctgctgagaagctgtgagtagttagcttaatcacttaggtcacctttaaacggtcgcagcgtgtgcgtgtccgtcgtacgttctggccggccgggccttgggcgcgcgatcagaagcgttgcgttggcgtgtgtgtgcttctggtttgctttaattttaccaagtttgtttcaaggtggatcgcgtggtcaaggcccgtgtgctttaaagacccaccggcactggcagtgagtgttgctgcttgtgtaggctttggtacgtatgggctttatttgcttctggatgttgtgtactacttgggtttgttgaattattatgagcagttgcgtattgtaattcagctgggctacctggacattgttatgtattaataaatgctttgctttcttctaaagatctttaagtgctcggccggccttggccacggtggccagatccactagaggcgcgcctctagtgcggccgcttaattaatctgacctgaccactagacctgagtgagtacagatgtgctactagtgctagcctcgaggtcgaccaacttttctatacaaagttgtctagacctaggactaggcactgagtgactcactgacctgactgagtgactggcggccgcagcttatagtaaagatttttttgttaataaaatgaaagttaatatttatggatttatttgaacatatttacaagtttttgttaataaatttatttacagaagtgttaaatttgaaaatgtgttaaatgagagttaatatttatggatataatattactttatttaaaaataaaatgaatttatattaaaatatgatttggtaaaagatattataaagaggaacttggatgagaaagacgacgatgggcaaaagttgcatggcacaccgcttttgttcagtaacatctgcactgtggcgcctttttcacactcaccatgcatgctgccacgtcagctttcacactatgacaccactggccatacacgttgccacctcagctttctcctcttctcactatgacacgactggccatgcatgcatgcatgctgccacctcagctcccgcctcttcacccgtgtctttctctcatgtcgcagtgctgcgtgccaacctcttctctctataaatagagagaagagaatgatggttaaactcaaaccaaaacaagaaaacatacacaaatagcaaaacggatccacaaccaaaaatggcgcttcgtgtcaagaccaacaagaagccatgttgggagatgaccaaggaggaactgacctctggcaaaactgaggtgttcaactatgaggaactcctggagtttgcagagggtgacatagctaaggtttttggtccggagtttgctgtcatagacaagtaccccagaagggtgaggctgcctgctcgtgaatacctgcttgtgacaagggtcacactcatggatgccgaggtcaacaactacagagttggtgccagaatggtcactgagtatgatcttccagtgaatggcgaattgtctgagggaggtgattgtccctgggcagttctggttgagagtggacagtgcgatttgatgctgatatcatacatgggaattgatttccagaaccaaggtgacagagtttaccgtctgctcaacaccacgttgacattctatggggttgcccatgagggagagacccttgagtatgacatcagagtgaccggttttgccaaacgtttggatggtggcatctccatgttcttctttgagtatgactgctatgtcaatgggaggcttctcattgagatgagagatggctgtgctggcttcttcacaaatgaggagcttgatgcgggaaagggtgtggtgttcacaagaggggatttggctgccagagctaagattccaaagcaagatgtttctccctatgctgtcgctccctgccttcacaaaacaaaactcaacgaaaaggagatgcagaccttggttgacaaagattgggcttccgtttttggctcaaagaatggcatgccggagatcaactacaaactctgcgcacgtaagatgctcatgattgatagagtcaccagcattgaccataagggaggtgtgtacggtttgggtcagttggttggtgagaaaatcttggagagggaccattggtacttcccatgccattttgttaaggatcaagtcatggctggatctcttgtcagcgacggttgttcacaaatgctcaagatgtacatgatctggctcggtttgcaccttaccaccggaccatttgacttcagacccgtcaacggacacccgaacaaagttaggtgtaggggtcagatatctcctcataagggaaagttggtctacgtcatggagatcaaagagatgggattcgacgaggataacgatccgtacgccattgctgacgtcaacatcattgacgttgatttcgaaaagggtcaagatttcagccttgatagaatcagcgactacggaaagggggatcttaacaaaaagatcgtcgtggacttcaagggcattgctctcaagatgcagaagagatccacgaacaagaacccctccaaagttcagcccgtttttgctaacggtgcagccactgtgggaccggaagcgtccaaggccagctctggtgccagtgctagtgcttctgctgcccctgcgaagcctgctttctcagcagatgttcttgcgccaaagccagttgcacttcctgaacatatcctcaagggtgacgctctcgctccgaaagaaatgtcctggcatcccatgtcaaaacttcctggcaacccgacgccgttcttctcccctagttcttaccctccgagggcaatttgcttcatccctttccctggcaacccacttgacaacaattgcaaagctggagaaatgcctctgaactggtacaacatgtcagagttcatgtgtggaaaagttagcaactgcttgggaccagagttcgcaagatttgataagtcaaatacgagcagaagccctgcttttgatttggctcttgtgactagagttgttgaagtcacaaacatggaacatggcaagttcctgaatgttgattgcaatcccagcaaaggcacaatggtgggggagtttgactgtcctcaagatgcgtggttctttgatggttcttgcaatgatgggcacatgccttattccatcatcatggaaatcggacttcagacatccggtgttctcaccagtgtgttgaaagcaccactgacgatggacaaagatgacattctctttaggaaccttgatgcaagtgctgaaatggtgaggccagatgtggatgtgagggggaaaaccataaggaatgtgaccaagtgcactggatatgcaatgttgggaaagatggggattcacagattcacgtttgagttgtctgttgatggcgtggttttctacaaaggaagcacttcctttggatggttcactccagaggtgtttgctcagcaagctggacttgacaatgggaaaaagacggagccttggtgcaaaactaacaacacgagtgtgagaagagttgaaatcgcatcagccaaaggcaaagaacagctgactgagaaacttccagatgcaactaatgctcaagttctcagaaggtcagaacagtgtgagtatttggattacctcaacattgctcctgattctgggctgcatgggaaaggatatgcgcatggacacaaagatgttaacccacaagactggttcttctcttgtcacttttggtttgatcctgtgatgcctggatctttgggaattgagtcaatgttccagctcattgaggcatttgcggtggaccagaacataccgggagaatacaatgtgagcaatccgacctttgcccatgcccctggaaaaacggcgtggaagtaccgtggtcaattgacaccaaagaaccgtgcgatggactgtgaggtgcacatagtttcaatcacagcctctcctgaaaatggaggctacgttgacatagtggcagatggagcactttgggttgatggtctccgtgtgtatgaagccaaagaactcagagttcgtgttgtcagtgcaaaacctcaagccattccggatgttcaacaacagccacccagcgcaaaagcggaccctgggaaaactggagttgcactcagtccgactcagttgagagatgtcctgcttgaagtggacaatccattgtatcttggtgttgaaaactccaatttggtgcagtttgaatccaaacctgcaacttcttcaaggattgtcagtatcaaaccatgctccataagtgatcttggtgacaagtccttcatggaaacgtacaatgtgtcagcacctctgtacactggagcaatggccaagggaattgcgtctgcggaccttgtcattgctgctgggaagaggaagatattgggttcttttggagcgggtgggcttccaatgcaccatgtgagggcagctttggagaagatacaagcggctctgcctcaaggaccatatgctgtgaacctcattcattcaccttttgacagcaacttggaaaaggggaatgttgatctcttcctcgaaaagggcgttactgtggtggaggcttctgcattcatgaccctcactccccaagttgttcgttaccgtgcagccggactctcaaggaacgctgatgggagtgtcaacatcagaaaccgtatcattggaaaagtgtccagaacagaactcgccgaaatgttcatcagaccggctccggaacacctccttgagaaactcatagcttctggtgagataacacaagaacaagccgaacttgcccgtcgtgttcctgtcgcagacgacatcgctgttgaagctgattctggtggtcacactgacaaccgtcccatccacgtcatcttgcctttgatcatcaaccttaggaacagactgcacagagagtgtggttatcctgcgcaccttagagtcagagttggagctggaggcggtgttggctgcccacaagctgctgcggctgccctcacaatgggagctgccttcatagtgactgggactgtcaatcaagttgctaaacagtccgggacatgtgacaacgtgagaaaacaactcagtcaagccacctacagtgacatttgcatggctccagcagctgatatgtttgaggaaggtgtgaaactccaagttctcaagaagggaacaatgttcccatcaagagctaacaaattgtacgaactcttttgcaagtacgactctttcgattcaatgcctcctgctgaacttgaaaggatcgagaagaggatcttcaagagggcacttcaagaggtctgggaagagaccaaggacttttacatcaatggtttgaagaatccagagaagatacagagagcggaacatgaccccaaactcaagatgtctttgtgtttcagatggtatcttggtcttgcatcacgttgggccaacatgggtgctcctgatcgtgtcatggactatcaagtctggtgtggtccagccattggagccttcaatgacttcatcaaaggaacatatcttgatcctgctgtctctaatgagtacccatgtgttgtccagatcaaccttcagattttgcgtggtgcatgttacctgaggcgtcttaatgctctgagaaatgatccgaggattgatcttgagactgaagatgctgcctttgtctatgagccaacgaatgcgctttgagtagttagcttaatcacttaggtcacctttaaacggtcgcagcgtgtgcgtgtccgtcgtacgttctggccggccgggccttgggcgcgcgatcagaagcgttgcgttggcgtgtgtgtgcttctggtttgctttaattttaccaagtttgtttcaaggtggatcgcgtggtcaaggcccgtgtgctttaaagacccaccggcactggcagtgagtgttgctgcttgtgtaggctttggtacgtatgggctttatttgcttctggatgttgtgtactacttgggtttgttgaattattatgagcagttgcgtattgtaattcagctgggctacctggacattgttatgtattaataaatgctttgctttcttctaaagatctttaagtgctcggccggccttggccacggtggccagatccactagaggcgcgcctctagtgcggccgcttaattaatcacgagtggatgactgtcacgactgactcatgactgactactagtgctagcctcgaggtcgacacaactttgtataataaagttgtctagacctaggagctgtgctgggtaactcacatgagtcactggtcacatcagcggccgcctcccagtatcattatagtgaaagttttggctctctcgccggtggttttttacctctatttaaaggggttttccacctaaaaattctggtatcattctcactttacttgttactttaatttctcataatctttggttgaaattatcacgcttccgcacacgatatccctacaaatttattatttgttaaacattttcaaaccgcataaaattttatgaagtcccgtctatctttaatgtagtctaacattttcatattgaaatatataatttacttaattttagcgttggtagaaagcataatgatttattcttattcttcttcatataaatgtttaatatacaatataaacaaattctttaccttaagaaggatttcccattttatattttaaaaatatatttatcaaatatttttcaaccacgtaaatctcataataataagttgtttcaaaagtaataaaatttaactccataatttttttattcgactgatcttaaagcaacacccagtgacacaactagccatttttttctttgaataaaaaaatccaattatcattgtattttttttatacaatgaaaatttcaccaaacaatgatttgtggtatttctgaagcaagtcatgttatgcaaaattctataattcccatttgacactacggaagtaactgaagatctgcttttacatgcgagacacatcttctaaagtaattttaataatagttactatattcaagatttcatatatcaaatactcaatattacttctaaaaaattaattagatataattaaaatattacttttttaattttaagtttaattgttgaatttgtgactattgatttattattctactatgtttaaattgttttatagatagtttaaagtaaatataagtaatgtagtagagtgttagagtgttaccctaaaccataaactataagatttatggtggactaattttcatatatttcttattgcttttaccttttcttggtatgtaagtccgtaactggaattactgtgggttgccatgacactctgtggtcttttggttcatgcatggatcttgcgcaagaaaaagacaaagaacaaagaaaaaagacaaaacagagagacaaaacgcaatcacacaaccaactcaaattagtcactggctgatcaagatcgccgcgtccatgtatgtctaaatgccatgcaaagcaacacgtgcttaacatgcactttaaatggctcacccatctcaacccacacacaaacacattgcctttttcttcatcatcaccacaaccacctgtatatattcattctcttccgccacctcaatttcttcacttcaacacacgtcaacctgcatatgcgtgtcatcccatgcccaaatctccatgcatgttccaaccaccttctctcttatataatacctataaatacctctaatatcactcacttctttcatcatccatccatccagagtactactactctactactataataccccaacccaactcatattcaatactactctaggatccacaaccaaaaatgcttcagcacacttggcttccgaagcctcccaatctgaccctcttgtcagatgaggttcatctctggaggattcctcttgaccagcctgagtcacaacttcaagaccttgctgccaccctgagcagtgatgaattggcgagggcaaacagattctactttccagaacacagaaggcgtttcactgctgggagaggcatcctcagatccatcttgggtggatacttgggagtggaaccgggtcaagtcaagtttgattatgagtcccgtgggaaaccgatccttggtgacagatttgctgagagtggactcctgttcaacttgtctcacagccagaaccttgccttgtgtgctgtcaactacacgcgtcaaataggcattgatcttgaatatctgcgtccaacatctgacttggagtctcttgcaaagaggttctttctcccaagagaatatgaactcttgaggtcactccctgatgagcagaaacagaagattttctttcgttactggacttgcaaagaggcttatctcaaagcaacgggagatggaatagccaaacttgaagagatcgagatagcactcaccccaacagaacctgccaagctccaaacagctcctgcgtggtctctgttggagcttgtgccagatgacaattgtgttgcagctgtggctgttgcgggttttggttggcagcccaagttctggcattactgagtagttagcttaatcacttaggtcacctttaaacggtcgcagcgtgtgcgtgtccgtcgtacgttctggccggccgggccttgggcgcgcgatcagaagcgttgcgttggcgtgtgtgtgcttctggtttgctttaattttaccaagtttgtttcaaggtggatcgcgtggtcaaggcccgtgtgctttaaagacccaccggcactggcagtgagtgttgctgcttgtgtaggctttggtacgtatgggctttatttgcttctggatgttgtgtactacttgggtttgttgaattattatgagcagttgcgtattgtaattcagctgggctacctggacattgttatgtattaataaatgctttgctttcttctaaagatctttaagtgctcggccggccttggccacggtggccagatccactagaggcgcgcctctagtgcggccgcttaattaactactgtcactgaggccgtagacgagtacggactgatctaactagtgctagcctcgaggtcgacacccagctttcttgtacaaagtggttgcggccgcttaattaaatttaaattcaattaatgcaatcttgattttcaacaacgaaggtaatggcgtaaaagaaaaaatgtatgttattgtattgatctttcatgatgttgaagcgtgccataatatgatgatgtataattaaaatattaactgtcgcattttattgaaatggcactgttatttcaaccatatctttgattctgttacatgacacgactgcaagaagtaaataatagacgccgttgttaaagaattgctatcatatgtgcctaactagagggaatttgagcgtcagacctaatcaaatattacaaaatatctcactctgtcgccagcaatggtgtaatcagcgcagacaaatggcgtaaagatcgcggaaaaacctccccgagtggcatgatagctgcctctgtattgctgatttagtcagccttatttgacttaagggtgccctcgttagtgacaaattgctttcaaggagacagccatgccccacactttgttgaaaaacaaattgcctttggggagacggtaaagccagttgctcttcaataaggaatgtcgaggaggcaatgtaaccgcctctggtagtacacttctctaatccaaaaatcaatttgtattcaagataccgcaaaaaacttatggtttaaaccctgcaggactagtccagaaggtaattatccaagatgtagcatcaagaatccaatgtttacgggaaaaactatggaagtattatgtaagctcagcaagaagcagatcaatatgcggcacatatgcaacctatgttcaaaaatgaagaatgtacagatacaagatcctatactgccagaatacgaagaagaatacgtagaaattgaaaaagaagaaccaggcgaagaaaagaatcttgaagacgtaagcactgacgacaacaatgaaaagaagaagataaggtcggtgattgtgaaagagacatagaggacacatgtaaggtggaaaatgtaagggcggaaagtaaccttatcacaaaggaatcttatcccccactacttatccttttatatttttccgtgtcatttttgcccttgagttttcctatataaggaaccaagttcggcatttgtgaaaacaagaaaaaatttggtgtaagctattttctttgaagtactgaggatacaacttcagagaaatttgtaagtttgtaggtaccagatctggatcccaaaccatgtctccggagaggagaccagttgagattaggccagctacagcagctgatatggccgcggtttgtgatatcgttaaccattacattgagacgtctacagtgaactttaggacagagccacaaacaccacaagagtggattgatgatctagagaggttgcaagatagatacccttggttggttgctgaggttgagggtgttgtggctggtattgcttacgctgggccctggaaggctaggaacgcttacgattggacagttgagagtactgtttacgtgtcacataggcatcaaaggttgggcctaggatctacattgtacacacatttgcttaagtctatggaggcgcaaggttttaagtctgtggttgctgttataggccttccaaacgatccatctgttaggttgcatgaggctttgggatacacagcccggggtacattgcgcgcagctggatacaagcatggtggatggcatgatgttggtttttggcaaagggattttgagttgccagctcctccaaggccagttaggccagttacccaaatctgagtagttagcttaatcacctagagctcgatcggcggcaatagcttcttagcgccatcccgggttgatcctatctgtgttgaaatagttgcggtgggcaaggctctctttcagaaagacaggcggccaaaggaacccaaggtgaggtgggctatggctctcagttccttgtggaagcgcttggtctaaggtgcagaggtgttagcgggatgaagcaaaagtgtccgattgtaacaagatatgttgatcctacgtaaggatattaaagtatgtattcatcactaatataatcagtgtattccaatatgtactacgatttccaatgtctttattgtcgccgtatgtaatcggcgtcacaaaataatccccggtgactttcttttaatccaggatgaaataatatgttattataatttttgcgatttggtccgttataggaattgaagtgtgcttgaggtcggtcgccaccactcccatttcataattttacatgtatttgaaaaataaaaatttatggtattcaatttaaacacgtatacttgtaaagaatgatatcttgaaagaaatatagtttaaatatttattgataaaataacaagtcaggtattatagtccaagcaaaaacataaatttattgatgcaagtttaaattcagaaatatttcaataactgattatatcagctggtacattgccgtagatgaaagactgagtgcgatattatggtgtaatacataggaattcgtttaaacgatctgcgtctaattttcggtccaacttgcacaggaaagacgtcgaccgcggtagctcttgcccagcagactgggcttccagtcctttcgctcgatcgggtccaatgttgtcctcagctgtgaaccggaagcggacgaccaacagtggaagaactgaaaggaacgagccgtctataccttgatgatcggcctctggtgaagggtatcatcgcagccaagcaagctcatgaaaggctgatgggggaggtgtataattatgaggcccacggcgggcttattctttagggaggatctatctcgttgctcaagtgcatggcgcaaagcagttattggagtgcggattttcgttggcatattattcgccacgagttagcagacgaagagaccttcatgaacgtggccaaggccagagttaagcagatgttacgccctgctgcaggcctttctattatccaatagttggttgatctttggaaagagcctcggctgaggcccatactgaaagagatcgatggatatcgatatgccatgttgtttgctagccagaaccagatcacatccgatatgctattgcagcttgacgcagatatggaggataagttgattcatgggatcgctcaggagtagctcatccatgcacgccgacaagaacagaaattccgtcgagttaacgcagccgcttacgacggattcgaaggtcatccattcggaatgtattagtttgcaccagctccgcgtcacacctgtcttcatttgaataagatgttagcaattgtttttagctttgtcttgttgtggcagggcggcaagtgcttcagacatcattctgttttcaaattttatgctggagaacagcttcttaattcctttggaaataatagactgcgtcttaaaattcagatgtctggatatagatatgattgtaaaataacctatttaagtgtcatttagaacataagttttatgaatgttcttccattttcgtcatcgaacgaataagagtaaatacaccttttttaacattacaaataagttcttatacgttgtttatacaccgggaatcatttccattattttcgcgcaaaagtcacggatattcgtgaaagcgacataaactgcgaaatttgcggggagtgtcttgagtttgcctcgaggctagcgcatgcacatagacacacacatcatctcattgatgcttggtaataattgtcattagattgtttttatgcatagatgcactcgaaatcagccaattttagacaagtatcaaacggatgtgacttcagtacattaaaaacgtccgcaatgtgttattaagttgtctaagcgtcaatttgatttacaattgaatatatcctgccccagccagccaacagctcgatttacaattgaatatatcctgccggccggcccacgcgtgtcgaggaattctgatctggcccccatttggacgtgaatgtagacacgtcgaaataaagatttccgaattagaataatttgtttattgctttcgcctataaatacgacggatcgtaatttgtcgttttatcaaaatgtactttcattttataataacgctgcggacatctacatttttgaattgaaaaaaaattggtaattactctttctttttctccatattgaccatcatactcattgctgatccatgtagatttcccggacatgaagccatttacaattgaatatatcctgccgccgctgccgctttgcacccggtggagcttgcatgttggtttctacgcagaactgagccggttaggcagataatttccattgagaactgagccatgtgcaccttccccccaacacggtgagcgacggggcaacggagtgatccacatgggacttttaaacatcatccgtcggatggcgttgcgagagaagcagtcgatccgtgagatcagccgacgcaccgggcaggcgcgcaacacgatcgcaaagtatttgaacgcaggtacaatcgagccgacgttcacgcggaacgaccaagcaagcttggctgccatttttggggtgaggccgttcgcggccgaggggcgcagcccctggggggatgggaggcccgcgttagcgggccgggagggttcgagaagggggggcaccccccttcggcgtgcgcggtcacgcgcacagggcgcagccctggttaaaaacaaggtttataaatattggtttaaaagcaggttaaaagacaggttagcggtggccgaaaaacgggcggaaacccttgcaaatgctggattttctgcctgtggacagcccctcaaatgtcaataggtgcgcccctcatctgtcagcactctgcccctcaagtgtcaaggatcgcgcccctcatctgtcagtagtcgcgcccctcaagtgtcaataccgcagggcacttatccccaggcttgtccacatcatctgtgggaaactcgcgtaaaatcaggcgttttcgccgatttgcgaggctggccagctccacgtcgccggccgaaatcgagcctgcccctcatctgtcaacgccgcgccgggtgagtcggcccctcaagtgtcaacgtccgcccctcatctgtcagtgagggccaagttttccgcgaggtatccacaacgccggcggccgcggtgtctcgcacacggcttcgacggcgtttctggcgcgtttgcagggccatagacggccgccagcccagcggcgagggcaaccagcccggtgagcgtcggaaagggtcgacggatcttttccgctgcataaccctgcttcggggtcattatagcgattttttcggtatatccatcctttttcgcacgatatacaggattttgccaaagggttcgtgtagactttccttggtgtatccaacggcgtcagccgggcaggataggtgaagtaggcccacccgcgagcgggtgttccttcttcactgtcccttattcgcacctggcggtgctcaacgggaatcctgctctgcgaggctggccggctaccgccggcgtaacagatgagggcaagcggatggctgatgaaaccaagccaaccaggaagggcagcccacctatcaaggtgtactgccttccagacgaacgaagagcgattgaggaaaaggcggcggcggccggcatgagcctgtcggcctacctgctggccgtcggccagggctacaaaatcacgggcgtcgtggactatgagcacgtccgcgagctggcccgcatcaatggcgacctgggccgcctgggcggcctgctgaaactctggctcaccgacgacccgcgcacggcgcggttcggtgatgccacgatcctcgccctgctggcgaagatcgaagagaagcaggacgagcttggcaaggtcatgatgggcgtggtccgcccgagggcagagccatgacttttttagccgctaaaacggccggggggtgcgcgtgattgccaagcacgtccccatgcgctccatcaagaagagcgacttcgcggagctggtattcgtgcagggcaagattcggaataccaagtacgagaaggacggccagacggtctacgggaccgacttcattgccgataaggtggattatctggacaccaaggcaccaggcgggtcaaatcaggaataagggcacattgccccggcgtgagtcggggcaatcccgcaaggagggtgaatgaatcggacgtttgaccggaaggcatacaggcaagaactgatcgacgcggggttttccgccgaggatgccgaaaccatcgcaagccgcaccgtcatgcgtgcgccccgcgaaaccttccagtccgtcggctcgatggtccagcaagctacggccaagatcgagcgcgacagcgtgcaactggctccccctgccctgcccgcgccatcggccgccgtggagcgttcgcgtcgtctcgaacaggaggcggcaggtttggcgaagtcgatgaccatcgacacgcgaggaactatgacgaccaagaagcgaaaaaccgccggcgaggacctggcaaaacaggtcagcgaggccaagcaggccgcgttgctgaaacacacgaagcagcagatcaaggaaatgcagctttccttgttcgatattgcgccgtggccggacacgatgcgagcgatgccaaacgacacggcccgctctgccctgttcaccacgcgcaacaagaaaatcccgcgcgaggcgctgcaaaacaaggtcattttccacgtcaacaaggacgtgaagatcacctacaccggcgtcgagctgcgggccgacgatgacgaactggtgtggcagcaggtgttggagtacgcgaagcgcacccctatcggcgagccgatcaccttcacgttctacgagctttgccaggacctgggctggtcgatcaatggccggtattacacgaaggccgaggaatgcctgtcgcgcctacaggcgacggcgatgggcttcacgtccgaccgcgttgggcacctggaatcggtgtcgctgctgcaccgcttccgcgtcctggaccgtggcaagaaaacgtcccgttgccaggtcctgatcgacgaggaaatcgtcgtgctgtttgctggcgaccactacacgaaattcatatgggagaagtaccgcaagctgtcgccgacggcccgacggatgttcgactatttcagctcgcaccgggagccgtacccgctcaagctggaaaccttccgcctcatgtgcggatcggattccacccgcgtgaagaagtggcgcgagcaggtcggcgaagcctgcgaagagttgcgaggcagcggcctggtggaacacgcctgggtcaatgatgacctggtgcattgcaaacgctagggccttgtggggtcagttccggctgggggttcagcagccagcgctttactggcatttcaggaacaagcgggcactgctcgacgcacttgcttcgctcagtatcgctcgggacgcacggcgcgctctacgaactgccgataaacagaggattaaaattgacaattgtgattaaggctcagattcgacggcttggagcggccgacgtgcaggatttccgcgagatccgattgtcggccctgaagaaagctccagagatgttcgggtccgtttacgagcacgaggagaaaaagcccatggaggcgttcgctgaacggttgcgagatgccgtggcattcggcgcctacatcgacggcgagatcattgggctgtcggtcttcaaacaggaggacggccccaaggacgctcacaaggcgcatctgtccggcgttttcgtggagcccgaacagcgaggccgaggggtcgccggtatgctgctgcgggcgttgccggcgggtttattgctcgtgatgatcgtccgacagattccaacgggaatctggtggatgcgcatcttcatcctcggcgcacttaatatttcgctattctggagcttgttgtttatttcggtctaccgcctgccgggcggggtcgcggcgacggtaggcgctgtgcagccgctgatggtcgtgttcatctctgccgctctgctaggtagcccgatacgattgatggcggtcctgggggctatttgcggaactgcgggcgtggcgctgttggtgttgacaccaaacgcagcgctagatcctgtcggcgtcgcagcgggcctggcgggggcggtttccatggcgttcggaaccgtgctgacccgcaagtggcaacctcccgtgcctctgctcacctttaccgcctggcaactggcggccggaggacttctgctcgttccagtagctttagtgtttgatccgccaatcccgatgcctacaggaaccaatgttctcggcctggcgtggctcggcctgatcggagcgggtttaacctacttcctttggttccgggggatctcgcgactcgaacctacagttgtttccttactgggctttctcagcccccgagcgcttagtgggaatttgtaccccttatcgaaccgggagcacaggatgacgcctaacaattcattcaagccgacaccgcttcgcggcgcggcttaattcaggagttaaacatcatgagggaagcggtgatcgccgaagtatcgactcaactatcagaggtagttggcgtcatcgagcgccatctcgaaccgacgttgctggccgtacatttgtacggctccgcagtggatggcggcctgaagccacacagtgatattgatttgctggttacggtgaccgtaaggcttgatgaaacaacgcggcgagctttgatcaacgaccttttggaaacttcggcttcccctggagagagcgagattctccgcgctgtagaagtcaccattgttgtgcacgacgacatcattccgtggcgttatccagctaagcgcgaactgcaatttggagaatggcagcgcaatgacattcttgcaggtatcttcgagccagccacgatcgacattgatctggctatcttgctgacaaaagcaagagaacatagcgttgccttggtaggtccagcggcggaggaactctttgatccggttcctgaacaggatctatttgaggcgctaaatgaaaccttaacgctatggaactcgccgcccgactgggctggcgatgagcgaaatgtagtgcttacgttgtcccgcatttggtacagcgcagtaaccggcaaaatcgcgccgaaggatgtcgctgccgactgggcaatggagcgcctgccggcccagtatcagcccgtcatacttgaagctaggcaggcttatcttggacaagaagatcgcttggcctcgcgcgcagatcagttggaagaatttgttcactacgtgaaaggcgagatcaccaaggtagtcggcaaataatgtctaacaattcgttcaagccgacgccgcttcgcggcgcggcttaactcaagcgttagagagctggggaagactatgcgcgatctgttgaaggtggttctaagcctcgtcttgcgatggcatttcgatccattcccattccgcgctcaagatggcttcccctcggcagttcatcagggctaaatcaatctagccgacttgtccggtgaaatgggctgcactccaacagaaacaatcaaacaaacatacacagcgacttattcacacgagctca

SEQ ID NO: 62 - DNA, 35499 bp, Artificial sequence
  plasmid pDAB9147
aattacaacggtatatatcctgccagtcagcatcatcacaccaaaagttaggcccgaatagtttgaaattagaaagctcgcaattgaggtctacaggccaaattcgctcttagccgtacaatattactcaccggatcctaaccggtttaattaaggcgcgccatgcccgggcaagcggccgcacaagtttgtacaaaaaagcaggcttctagacctaggtggagtcatcacgcagactatctcagcatgtgcgtagcacgcggccgcagcttatagtaaagatttttttgttaataaaatgaaagttaatatttatggatttatttgaacatatttacaagtttttgttaataaatttatttacagaagtgttaaatttgaaaatgtgttaaatgagagttaatatttatggatataatattactttatttaaaaataaaatgaatttatattaaaatatgatttggtaaaagatattataaagaggaacttggatgagaaagacgacgatgggcaaaagttgcatggcacaccgcttttgttcagtaacatctgcactgtggcgcctttttcacactcaccatgcatgctgccacgtcagctttcacactatgacaccactggccatacacgttgccacctcagctttctcctcttctcactatgacacgactggccatgcatgcatgcatgctgccacctcagctcccgcctcttcacccgtgtctttctctcatgtcgcagtgctgcgtgccaacctcttctctctataaatagagagaagagaatgatggttaaactcaaaccaaaacaagaaaacatacacaaatagcaaaacggatccacaaccaaaaatggcagcgaggctgcaagagcagaaaggaggtgagatggacacgaggattgcgatcataggcatgagcgccatacttccttgtggaaccacggtgagagagtcatgggagaccataagggctggcattgattgcctgtctgatcttcctgaggatcgtgttgatgtgactgcgtactttgacccagtcaagaccacaaaggacaaaatctactgcaagagaggaggtttcattcctgagtatgactttgatgcgcgtgagtttggtctcaacatgttccagatggaagattctgatgcgaatcagaccatctcacttctcaaggtcaaagaagcacttcaagatgctgggattgatgcacttggaaaggagaagaaaaacataggatgcgtgcttggcattggaggtggacagaagagttcacatgagttctacagcagactcaactatgtggttgtggagaaagtcttgagaaagatggggatgccagaggaagatgtcaaagtggctgtggagaagtacaaagcgaacttcccagaatggagacttgactctttccctggattccttgggaatgtcactgctggcagatgcaccaacacattcaacttggatggcatgaactgcgttgtggatgctgcatgtgcaagctccttgatagcagtcaaggttgcgattgatgaactgctctatggtgactgcgacatgatggtcactggtgcaacctgcacagacaactccattgggatgtacatggctttctcaaagacacctgtgttcagcacggacccaagtgtgagagcgtatgatgagaaaacgaaagggatgctcattggtgagggatcagccatgttggtgctcaaacgttatgcagatgcagtgagggatggtgatgagattcatgctgtgattcgtggttgtgcaagctcaagtgatggcaaagcagctggcatctacactcccacaatcagtggtcaagaggaagccttgagacgtgcatacaatcgtgcctgcgttgaccctgccactgtcactttggttgagggtcatgggactggcactccagttggagataggattgagttgactgcgttgaggaacttgtttgacaaagcgtatggtgaagggaacacagagaaagttgcagttggaagtatcaagtccagtattggtcatttgaaggctgttgctggtcttgctggaatgatcaaggtcatcatggctctcaaacacaagactttgcctggaacgatcaatgtggacaatccacccaatctctatgacaacactcccatcaatgagtcatccctctacatcaacacgatgaacagaccctggttccctccacctggtgttccgagacgtgctggaatatccagctttggctttggaggtgccaactaccatgcagtgttggaagaggctgaaccagagcacacgacagcgtacagactcaacaaacgtccacaaccggtgttgatgatggctgcaactcctgctgcgttgcagagcctttgtgaagctcagctgaaagagtttgaagctgcgatcaaggagaatgagacagtcaagaatactgcctacatcaagtgtgtcaagtttggagaacagttcaagttccctgggagcatacctgcgaccaatgcgagactgggattcttggtcaaagatgcggaggatgcgtgctccacgcttcgtgctatatgtgctcagtttgccaaagatgtgaccaaagaagcgtggaggcttccgagagaaggagtttctttccgtgccaaaggcattgccaccaatggtgctgttgctgcactcttctctggacaaggtgctcagtacacacacatgttcagtgaagttgcgatgaactggcctcagttcagacagtccattgctgcaatggacgctgcacagtccaaggttgctggaagtgacaaagactttgaaagagtctctcaagtcctgtacccaaggaaaccgtacgaacgtgagccagaacaagatcacaagaaaatctcactcacagcatacagccagccgtcaaccctggcatgtgctcttggtgcctttgagattttcaaggaagctggattcactccagactttgcagctggacacagcttgggtgagtttgctgcgctctatgcagctggttgtgttgacagagatgagttgtttgaacttgtttgcagaagggcaaggatcatgggaggcaaagatgcacctgccacacccaaaggttgcatggcagctgtcataggacccaacgcagagaacatcaaggttcaagctgccaacgtctggcttggaaactcaaactctccgtctcagactgtcattactgggtctgttgaagggattcaagctgaaagtgccagattgcagaaggaagggttcagagttgtgcctcttgcttgtgagtctgccttccattctccacagatggaaaatgccagctcagctttcaaagatgtcatatccaaggtttccttccgtacacccaaagcagaaacaaagctcttcagcaatgtttctggagagacctatccgacggatgccagagagatgctcactcaacacatgacctcatctgtgaagttcctgacccaagtgaggaacatgcaccaagctggtgcgagaatctttgttgagtttggaccgaaacaagttctcagcaaacttgtttctgaaaccctcaaagatgacccgtctgttgtcacagtgtctgtgaacccagcttctggcacggactctgacatacagttgagggatgctgcagttcagctggttgtggctggtgtcaatcttcaagggtttgacaagtgggatgctcctgatgccacgaggatgcaagccatcaagaaaaagagaaccacactcagactttcagctgccacctatgtcagtgacaagaccaagaaagtgagggatgctgccatgaacgacggaagatgtgtcacatacctcaagggtgctgcaccactcatcaaggctcctgaacctgtggttgacgaagctgccaagagggaggctgaaaggcttcagaaggagcttcaagacgctcagaggcagcttgacgacgccaaacgtgcagctgcagaagccaactccaaacttgctgctgccaaggaggaagccaagactgctgcagcttcagccaagcctgcagttgacactgctgttgtggagaaacatcgtgccatcctcaagtccatgctggctgagctggatggttatggaagtgttgatgcttcttcccttcagcaacagcaacagcaacagactgctccggcgcctgttaaagccgctgcccctgccgctcccgttgcaagtgctcctgctcccgccgtgtccaacgagttgcttgagaaagctgagacagttgtgatggaggttctcgctgccaagactggatacgaaacagacatgattgaggcggacatggagcttgagactgagttgggaattgacagcatcaagagggttgaaattctttctgaagtccaagctatgcttaacgttgaggcgaaagatgttgatgctctctctaggacgagaacagtgggtgaagttgtcaacgctatgaaggcagaaatcgctggttcttccgctccggcgccggcagctgccgcacctgcaccggctaaagcggctccagctgcagctgcaccagctgtttctaatgagctgctcgaaaaggcagaaactgttgtgatggaagtccttgctgccaaaactggctacgaaactgacatgatagaatcagacatggagcttgagacggagcttggaattgattccatcaagcgtgtggaaatcctcagtgaagtccaagccatgctcaatgtggaagctaaggatgtggatgctctctcaaggaccagaactgtcggtgaggttgtcaatgccatgaaggctgagatagctggaggctccgctcctgcgccggccgctgccgctcctggtcccgctgccgcggctccagctccagctgcagccgctccggccgtctcaaacgaactccttgaaaaagctgagaccgtcgtgatggaggtcttggcagctaaaaccggctatgagactgacatgattgagtctgacatggaattggagacagaacttgggatagacagcatcaaacgtgttgaaatcctcagtgaggtccaagctatgctgaacgtggaagcgaaggatgttgatgctctgtccagaacgaggaccgttggtgaggttgtggatgccatgaaggctgaaattgctggagggtctgcgcccgcgccagctgcagccgctcctgcacccgcagccgcggcacctgctccagctgcacctgcacctgccgtttcttcagaactcttggagaaggctgagacggttgtgatggaggttttggctgcaaagactggctatgagaccgacatgattgaatctgatatggaattggagacagagcttgggatcgattccatcaaaagagtggagatcctgagtgaagtccaagccatgctcaatgttgaagctaaggatgttgatgcactttcaagaacaaggacagtgggtgaggttgtggatgccatgaaggcggagattgctggagggagcgcgcctgcgccagctgccgcggcacctgcaccggcagccgcagctccagctccagctgcaccagcaccggccgcgcccgcgccagctgtttcatccgaactcctggaaaaggccgagacggttgtgatggaggtgctcgcagctaagactggttacgagaccgacatgattgaaagtgacatggagcttgaaaccgagttgggaatagatagcatcaaacgtgttgaaatcttgtctgaggtccaagctatgttgaacgtggaggcaaaagatgtcgatgcgctttcaagaaccagaacagtcggtgaggtcgtggacgccatgaaggctgaaattgccggaagctctgctagtgcgccagctgcagccgcacctgcacctgctgccgcggcacctgctccagctgcagccgctcctgccgtcagcaatgagttgctggagaaagccgaaacagttgtgatggaagtccttgctgcaaaaactggttacgaaacggacatgattgagtcagacatggaattggagaccgaacttggaatagattccatcaagagagtggagatcctctctgaggtgcaagccatgctcaacgttgaggctaaagatgttgatgcactcagtaggacaagaactgtgggggaagttgtcgatgcgatgaaggctgagattgctggaggctctgctcctgcgccggcagctgccgcacctgcacccgcagccgcggcaccagctgtcagcaacgaattgcttgagaaggctgaaacagttgtcatggaagtgctggctgcaaaaaccggctatgagactgacatgattgagtctgacatggaacttgagacggaattgggcattgacagcatcaagcgtgttgagatcctcagtgaagtccaagcaatgctcaatgtggaggctaaggatgtggatgccctctcaaggaccagaacagttggtgaggtcgttgatgcgatgaaggcggagatcgctggaagttccgcgcctgcgccagctgcagccgctcctgcacccgcagccgcggcaccggctccagctgcagccgcaccggccgtctcctcagaactcctggaaaaggctgagacagttgtgatggaagtccttgctgcgaaaactggctatgagaccgacatgattgaatctgacatggaactggagaccgagcttggaattgactccatcaaacgtgttgaaatcctctctgaggttcaagcgatgttgaatgtggaggccaaagatgttgatgctctttccagaacaaggacggtgggagaggtggttgatgccatgaaggctgagatagctgggggttctgctcctgcgccagctgcagccgctcctgctcccgctgccgcggcaccagctgtcagcaacgaactccttgaaaaagctgaaactgttgtgatggaggttttggctgcaaagactggatacgagactgacatgatagagtcagacatggagttggaaacagagcttgggattgatagcatcaagcgtgtggaaatcctttctgaggttcaagccatgctgaacgttgaggccaaagatgtcgatgctttgtcaaggaccagaacggttggagaagtggtcgatgccatgaaggctgagatagctggtggatcagcccctgctccggctgcagccgctcctgcaagtgccggtgctgcaccagctgtgaagattgattcagttcatggtgctgactgtgacgatttgtcactgatgcacgcaaaggtggttgacatcagaaggccagatgaactgattctggaaagaccggagaaccgtccagttcttgtcgttgacgatggctcagagttgacacttgctcttgtgagggtgttgggagcctgtgcagttgtcttgacctttgagggattgcagttggctcagagagctggtgcagctgccattcgtcatgttctggctaaggacctttcagcagaatcagctgagaaggccatcaaagaggctgagcaaagatttggagcgttgggaggcttcataagccagcaagcagaaaggtttgaaccagctgagatactgggtttcacactcatgtgtgcgaagtttgccaaagcctctctctgcactgctgtggctggaggtcgtcctgccttcatcggtgtggctaggcttgacggcagacttggattcacctctcaaggcacttctgacgcactcaagagagcacagcgtggagcgatctttggactctgcaagacaatagggttggagtggtcagaatctgatgtgttcagccgtggtgtggacattgctcaagggatgcacccagaagatgctgcagttgccatagttagggagatggcgtgtgctgacatcagaatcagagaggttgggattggagcaaaccagcaaagatgcacaatcagagctgccaagttggagactgggaaccctcagagacagatagcgaaagacgatgtgcttctggtttctggaggtgctcgtgggatcacacctctttgcatccgtgagatcacgcgtcagattgctggaggcaagtacattctgttgggtcgtagcaaagtttctgcgtctgaaccagcatggtgtgctggcatcactgatgagaaggctgtgcagaaagctgccacccaagagttgaagagggccttcagtgctggtgaaggacccaaacccactccaagggctgtcacgaaacttgtgggatctgttcttggtgctcgtgaagtgagaagctccattgctgccattgaagctctgggtggcaaagcgatctacagctcttgtgatgtgaactctgctgcagatgttgccaaagcagttagggatgcagagtcccagcttggtgccagagttagtggaatcgttcacgcttctggtgtgctccgtgatcgtctcatagagaagaaactccctgacgagtttgatgctgtctttgggaccaaagtcactgggttggagaatcttctggctgcagttgatcgtgccaacctcaaacacatggttctcttcagctcccttgctggtttccacggcaatgttggtcagtctgactatgcgatggcaaacgaagctctcaacaagatgggtttggaacttgcgaaggatgtcagtgtcaagtccatctgctttggtccctgggatggtgggatggtgacacctcaactcaagaaacagtttcaagaaatgggagttcagatcattcctcgtgaaggaggtgctgatacagttgcgaggattgtgttgggatcaagtcctgctgagatccttgttggaaactggaggacaccatccaagaaagttggaagtgacacgatcaccctgcatagaaagatcagtgccaagtccaatcccttcttggaggatcatgtcatacaaggcagaagggtgttgccaatgacccttgctattgggagccttgctgagacctgccttggactcttccctggctactctctctgggccatagatgacgcacagctcttcaaaggtgtcactgttgatggagacgtcaactgtgaagtgaccctcacaccgtccactgctccgagtgggagggtgaatgtccaagcgacgctcaagacgttctcaagtggaaaacttgttccagcctacagagctgtcatagtgttgtccaaccaaggtgctccacctgccaatgcaaccatgcagcctccgagccttgatgcagatcctgctttgcaagggtcagtctatgatggcaagactctctttcatggtcctgcgttcagaggcattgatgacgttctcagctgcaccaagagccagcttgttgccaagtgttctgctgttcctggatcagatgcagccagaggagagtttgcaactgacactgatgcacatgatccctttgtcaatgatcttgcctttcaagcaatgttggtctgggtgaggagaacgctgggacaagctgcactcccgaactccattcagaggatagtccaacacagaccggtcccacaagacaaacccttctacatcaccctcagatccaatcagagtggtggacatagccagcacaaacatgcacttcagttccacaacgaacaaggtgatctcttcattgatgttcaagcctctgtcattgcgacagactcacttgcgttctgagtagttagcttaatcacttaggtcacccagtccaagcccggcctagcacgatgatcatgagtgttgctattgatgtatgttaatactatacacagtcatcgtgtgtgttttataaaactgtaagcttaggatgtttgaggctaatgtaattagcactacaccgtaataaatgagaggtttactttatgttttaataatgttcttacccttgctgctctctaaactgtaatggcgtacggttagctaaactaaagtaaaaatcgattcgcttgagtaaaattagtgaccgggaaagatcatcgactactactgctcagagatgtaatcggtaattaagacttcaagctcaataattaattaggagtaaatctggcttcgaatttttaaattgtcaacttccaaagaaggattggcaagactcaatctcaattgcccaacaaacatatggctctttacaaatttggaatctctttttgatggcaagaacgtcgtaattcctctgtcgatctcatgtaattaccaaactcatctacttattactttctttatatgcacttactgatgcggccgcttaattaagatgagtgatactcaggactcaggactcactctgctgatcactagtggtcgcagcgtgtgcgtgtccgtcgtacgttctggccggccgggccttgggcgcgcgatcagaagcgttgcgttggcgtgtgtgtgcttctggtttgctttaattttaccaagtttgtttcaaggtggatcgcgtggtcaaggcccgtgtgctttaaagacccaccggcactggcagtgagtgttgctgcttgtgtaggctttggtacgtatgggctttatttgcttctggatgttgtgtactacttgggtttgttgaattattatgagcagttgcgtattgtaattcagctgggctacctggacattgttatgtattaataaatgctttgctttcttctaaagatctttaagtgctgtcgacacaactttgtatacaaaagttgtctagacctaggctcagcaactcatccagtcaagttcgagtcagtgagttgggcggccgcagcttatagtaaagatttttttgttaataaaatgaaagttaatatttatggatttatttgaacatatttacaagtttttgttaataaatttatttacagaagtgttaaatttgaaaatgtgttaaatgagagttaatatttatggatataatattactttatttaaaaataaaatgaatttatattaaaatatgatttggtaaaagatattataaagaggaacttggatgagaaagacgacgatgggcaaaagttgcatggcacaccgcttttgttcagtaacatctgcactgtggcgcctttttcacactcaccatgcatgctgccacgtcagctttcacactatgacaccactggccatacacgttgccacctcagctttctcctcttctcactatgacacgactggccatgcatgcatgcatgctgccacctcagctcccgcctcttcacccgtgtctttctctcatgtcgcagtgctgcgtgccaacctcttctctctataaatagagagaagagaatgatggttaaactcaaaccaaaacaagaaaacatacacaaatagcaaaacggatccacaaccaaaaatggctgcaaggaacgtgagtgcggctcatgagatgcatgacgagaagaggatagctgttgtgggcatggctgttcagtatgctggatgcaaaacgaaagacgagttctgggaagttctcatgaatggaaaagttgagagcaaagtgatcagcgacaaacgtcttggttcaaattaccgtgctgaacactacaaagctgaaaggagcaagtatgctgacaccttctgcaatgagacatatggaactcttgatgagaacgaaatagacaatgagcatgaactccttttgaaccttgccaaacaagccttggctgaaacatctgtcaaagattcaacaagatgtggcatagtttctggatgcctcagcttcccgatggacaacctccaaggtgaactcttgaatgtgtaccagaaccatgttgagaagaaacttggtgccagagttttcaaagatgcctctcactggtcagaaagagaacagtccaacaaaccagaggctggtgacagaagaatcttcatggaccctgcttcctttgttgctgaggaactcaatcttggcgctctccactactctgttgatgctgcctgtgccactgcgctctatgtgctcagactggcgcaagatcacttggtctctggtgcagctgatgtgatgctttgtggtgcaacatgcctgccggagccgtttttcatactctctgggttctcaaccttccaagccatgcctgttggaacgggtcagaatgtgtccatgccgctgcacaaagattctcaaggattgacccctggtgaaggaggttccatcatggtcctcaaacgtttggatgacgcaatcagagatggagatcacatctatggaacacttttgggagccaatgtcagcaacagtggcactggtctgccacttaaaccccttttgccgtcagagaaaaagtgcctcatggacacctacacacgtatcaatgtgcatccccacaagattcagtatgttgaatgccatgcaactgggactccacaaggtgatcgtgtggaaattgatgctgtgaaggcttgctttgaaggcaaagtcccacgttttggaaccacaaaagggaactttggacacacattggtggcagctgggtttgctggcatgtgcaaagtgcttctctccatgaagcacgggatcattccacccactccgggaatagatgacgaaacgaagatggaccctctggttgtctctggtgaggccattccctggccagaaacgaatggagaaccgaagcgtgctggtctctcagcgtttggatttggtgggaccaatgctcatgctgtctttgaggaacatgacccaagcaatgctgcatgcactggccatgactccatttctgctctctctgcacgttgtggtggtgagtcaaacatgagaatagcaatcactgggatggatgccacttttggtgctttgaaaggattggatgcttttgaaagggccatctacactggtgctcatggtgctataccactcccagaaaagagatggagattcctggggaaagacaaggacttccttgatctttgtggagtcaaagcaacaccgcatggctgttacattgaagatgttgaagttgatttccagaggctgaggactccaatgactcctgaagatatgctcttgcctcaacagcttctggctgtcaccacaattgatagggccatattggactctggcatgaagaaaggtggaaatgtggctgtctttgtggggttggggaccgatcttgaactctaccgtcaccgtgcaagggttgctctcaaggagagagtgaggcctgaagccagcaagaaactcaatgacatgatgcagtacatcaatgattgtgggacaagcacttcttacaccagctacataggcaacttggttgcaacaagggtcagttcacaatggggcttcacgggaccttccttcacaatcacagaaggcaacaattctgtgtacagatgtgctgaacttggcaaatacctcttggaaacgggagaggttgatggggttgtggttgcgggtgttgatctctgtgggagtgctgagaacctttacgtcaagtcaaggcgtttcaaggtgtctacatctgacaccccgagagccagctttgatgcagctgctgatggttactttgttggagagggctgtggtgcatttgtgctcaagcgtgagacaagctgcaccaaggatgacagaatctatgcttgcatggatgccatagttcctggaaatgttccatctgcatgtttgagagaggcattggatcaagccagagtcaagcctggagacatcgagatgttggagctttctgctgattcagcgaggcatttgaaggacccgtctgttctcccaaaggaactcactgctgaggaagagattggcggacttcagacgattcttcgtgacgatgacaagctcccaaggaatgttgcaactggaagtgtcaaggccactgttggtgacactggttatgcttctggtgctgccagtttgattaaggctgcgctttgcatctacaaccgttacctgcccagcaatggagatgactgggatgaacctgcacctgaagcaccctgggacagcacactctttgcgtgccagacctcaagagcttggttgaagaaccctggtgagagacgttatgcggctgtttccggagtcagtgaaaccagaagttgctacagtgtgctgctttctgaagcagagggacactacgagagagagaacagaatcagtttggatgaggaagcacccaagctcattgtgttgagagcagactcccatgaagagattcttggaagattggacaagataagggaaaggttcttgcagcccacgggtgctgcacccagagagtctgaattgaaggcgcaagcccgtaggatctttcttgaactccttggtgagacccttgcccaagatgcagcttcatctggaagtcagaagccccttgctctcagcttggtctccactccatccaagctccagagagaggtggaacttgcggcaaaaggcattccgagatgtctcaagatgagacgtgattggagttcccctgctggaagcagatatgcgcctgagcctttggccagtgacagagttgccttcatgtatggagaaggaaggagcccttactatggcatcacacaagacattcataggatttggcctgaacttcatgaggtcatcaatgagaaaacaaaccgtctctgggctgaaggtgacagatgggtcatgccaagggccagcttcaagagtgagcttgagtcacaacagcaagagtttgacagaaacatgattgaaatgttccgtcttggaatcctcacctcaattgccttcacaaacctggcgagagatgttctcaacatcacgcccaaagcagcctttggactcagtttgggagagatttccatgatctttgctttctccaagaaaaacggtttgataagcgatcagttgacaaaggatttgagagagtcagatgtctggaacaaagctctggctgttgagttcaatgcgctcagagaagcctggggcattccacagtctgtcccaaaagatgagttctggcaaggttacatagtgaggggaacgaaacaagacatagaagcagccatagcaccagactcaaagtatgtgaggttgaccatcatcaatgatgccaacactgctctcatcagtggaaagcctgatgcatgcaaagctgcgattgctcgtcttggtggcaacatccctgcgcttccagtcactcaaggcatgtgtgggcattgcccagaggtgggaccttacaccaaggacatcgcaaagatccacgccaaccttgagttccctgtggttgatggtcttgatctctggactaccataaaccagaagaggcttgtgccaagagccacgggtgccaaagatgaatgggctccttcatcctttggggagtatgctggacagctctatgagaaacaagccaacttccctcagatagttgaaaccatctacaagcagaactatgatgtgtttgttgaagttgggccaaacaatcacagaagcacagcagtgagaaccacgcttggaccacagagaaaccaccttgctggtgccatagacaagcagaacgaggatgcttggacgacaatagtcaagctcgtggcttcattgaaggctcaccttgttcctggagtgaccatcagtccgctctaccactccaagctcgttgcagaggctgaggcttgttatgctgcgctctgtaaaggtgagaaacccaagaaaaacaagtttgtgagaaagattcagttgaatggcagattcaacagcaaggcagaccccatctcctcagcagaccttgcatccttcccacctgcggaccctgcgattgaagctgccatctcttcaaggatcatgaagcctgtggctccgaaattctatgcgcgtctcaacattgatgagcaagatgagaccagagatccgatcttgaacaaggacaatgcgccttccagctccagctcttccagcagttcctcttccagcagttcatctccgtctcctgctccttcagctccagttcagaagaaagctgccccagctgcggagacaaaagctgttgccagtgctgatgcacttcgtagtgccctgcttgatcttgactccatgcttgcgctcagctctgcaagtgcttctggcaaccttgttgagactgcgccatctgatgccagtgtcattgtccctccgtgcaacattgctgatcttggcagcagagctttcatgaaaacttatggtgtttctgcgcctctgtacaccggtgcaatggccaagggaattgcctctgcggacttggtgatcgcagctggaaggcaaggaatccttgcgtcatttggtgctggaggccttccaatgcaagttgtgcgtgagtccattgaaaagattcaagctgccctgcccaatggaccatatgctgtcaacctcatccattctccttttgacagcaaccttgagaagggaaatgttgatctcttcttggaaaagggtgtcacttttgttgaggcttcagccttcatgacgttgacaccgcaagttgtcagatacagagcggctgggttgacgaggaatgcagatgggtcagtcaacataaggaacagaatcattgggaaagtctccagaactgagctggctgaaatgttcatgcgtcctgcacctgagcatcttttgcagaagctcattgcttctggggagatcaatcaagaacaagctgagttggccagacgtgttcctgtggctgatgacattgcggttgaagctgattctggtggacacactgacaaccgtccaatccatgtcattctgcctctgattatcaacctgagggataggcttcacagagagtgtggatacccagcaaacctgagggttcgtgttggtgctgggggtggcattgggtgtccccaagctgcgctggcaactttcaacatgggtgcctctttcattgtcactggaacagtgaaccaagttgccaaacaatctgggacgtgtgacaatgtgaggaaacagcttgcgaaagcaacttactcagatgtttgcatggcaccggcagctgacatgtttgaggaaggtgtgaaacttcaagttttgaagaaaggaacaatgttcccttcaagagccaacaaactctatgagttgttctgcaagtatgattcttttgagtccatgcctccagcagagcttgcgagggttgagaaaagaatcttcagtcgtgcattggaagaggtctgggatgagaccaagaacttctacatcaaccgtctccacaacccagagaagatacagagggctgagagggaccccaaactgaagatgtcactgtgtttcagatggtatctgtccctggcttcaaggtgggccaacactggagcttctgacagagtcatggactaccaagtttggtgtggtcctgccattggttcattcaatgatttcatcaaaggaacttaccttgatccggcagtggcaaatgagtacccgtgtgttgtgcagatcaacaaacagattcttagaggagcgtgcttcttgaggcgtcttgaaatactgagaaatgcaaggctttcagatggtgcagctgcacttgtggcgagcattgatgacacatatgtccctgctgagaagctgtgagtagttagcttaatcacttaggtcacccagtccaagcccggcctagcacgatgatcatgagtgttgctattgatgtatgttaatactatacacagtcatcgtgtgtgttttataaaactgtaagcttaggatgtttgaggctaatgtaattagcactacaccgtaataaatgagaggtttactttatgttttaataatgttcttacccttgctgctctctaaactgtaatggcgtacggttagctaaactaaagtaaaaatcgattcgcttgagtaaaattagtgaccgggaaagatcatcgactactactgctcagagatgtaatcggtaattaagacttcaagctcaataattaattaggagtaaatctggcttcgaatttttaaattgtcaacttccaaagaaggattggcaagactcaatctcaattgcccaacaaacatatggctctttacaaatttggaatctctttttgatggcaagaacgtcgtaattcctctgtcgatctcatgtaattaccaaactcatctacttattactttctttatatgcacttactgatgcggccgcttaattaatctgacctgaccactagacctgagtgagtacagatgtgctactagtgctagcctcgaggtcgaccaacttttctatacaaagttgtctagacctaggactaggcactgagtgactcactgacctgactgagtgactggcggccgcagcttatagtaaagatttttttgttaataaaatgaaagttaatatttatggatttatttgaacatatttacaagtttttgttaataaatttatttacagaagtgttaaatttgaaaatgtgttaaatgagagttaatatttatggatataatattactttatttaaaaataaaatgaatttatattaaaatatgatttggtaaaagatattataaagaggaacttggatgagaaagacgacgatgggcaaaagttgcatggcacaccgcttttgttcagtaacatctgcactgtggcgcctttttcacactcaccatgcatgctgccacgtcagctttcacactatgacaccactggccatacacgttgccacctcagctttctcctcttctcactatgacacgactggccatgcatgcatgcatgctgccacctcagctcccgcctcttcacccgtgtctttctctcatgtcgcagtgctgcgtgccaacctcttctctctataaatagagagaagagaatgatggttaaactcaaaccaaaacaagaaaacatacacaaatagcaaaacggatccacaaccaaaaatggcgcttcgtgtcaagaccaacaagaagccatgttgggagatgaccaaggaggaactgacctctggcaaaactgaggtgttcaactatgaggaactcctggagtttgcagagggtgacatagctaaggtttttggtccggagtttgctgtcatagacaagtaccccagaagggtgaggctgcctgctcgtgaatacctgcttgtgacaagggtcacactcatggatgccgaggtcaacaactacagagttggtgccagaatggtcactgagtatgatcttccagtgaatggcgaattgtctgagggaggtgattgtccctgggcagttctggttgagagtggacagtgcgatttgatgctgatatcatacatgggaattgatttccagaaccaaggtgacagagtttaccgtctgctcaacaccacgttgacattctatggggttgcccatgagggagagacccttgagtatgacatcagagtgaccggttttgccaaacgtttggatggtggcatctccatgttcttctttgagtatgactgctatgtcaatgggaggcttctcattgagatgagagatggctgtgctggcttcttcacaaatgaggagcttgatgcgggaaagggtgtggtgttcacaagaggggatttggctgccagagctaagattccaaagcaagatgtttctccctatgctgtcgctccctgccttcacaaaacaaaactcaacgaaaaggagatgcagaccttggttgacaaagattgggcttccgtttttggctcaaagaatggcatgccggagatcaactacaaactctgcgcacgtaagatgctcatgattgatagagtcaccagcattgaccataagggaggtgtgtacggtttgggtcagttggttggtgagaaaatcttggagagggaccattggtacttcccatgccattttgttaaggatcaagtcatggctggatctcttgtcagcgacggttgttcacaaatgctcaagatgtacatgatctggctcggtttgcaccttaccaccggaccatttgacttcagacccgtcaacggacacccgaacaaagttaggtgtaggggtcagatatctcctcataagggaaagttggtctacgtcatggagatcaaagagatgggattcgacgaggataacgatccgtacgccattgctgacgtcaacatcattgacgttgatttcgaaaagggtcaagatttcagccttgatagaatcagcgactacggaaagggggatcttaacaaaaagatcgtcgtggacttcaagggcattgctctcaagatgcagaagagatccacgaacaagaacccctccaaagttcagcccgtttttgctaacggtgcagccactgtgggaccggaagcgtccaaggccagctctggtgccagtgctagtgcttctgctgcccctgcgaagcctgctttctcagcagatgttcttgcgccaaagccagttgcacttcctgaacatatcctcaagggtgacgctctcgctccgaaagaaatgtcctggcatcccatgtcaaaacttcctggcaacccgacgccgttcttctcccctagttcttaccctccgagggcaatttgcttcatccctttccctggcaacccacttgacaacaattgcaaagctggagaaatgcctctgaactggtacaacatgtcagagttcatgtgtggaaaagttagcaactgcttgggaccagagttcgcaagatttgataagtcaaatacgagcagaagccctgcttttgatttggctcttgtgactagagttgttgaagtcacaaacatggaacatggcaagttcctgaatgttgattgcaatcccagcaaaggcacaatggtgggggagtttgactgtcctcaagatgcgtggttctttgatggttcttgcaatgatgggcacatgccttattccatcatcatggaaatcggacttcagacatccggtgttctcaccagtgtgttgaaagcaccactgacgatggacaaagatgacattctctttaggaaccttgatgcaagtgctgaaatggtgaggccagatgtggatgtgagggggaaaaccataaggaatgtgaccaagtgcactggatatgcaatgttgggaaagatggggattcacagattcacgtttgagttgtctgttgatggcgtggttttctacaaaggaagcacttcctttggatggttcactccagaggtgtttgctcagcaagctggacttgacaatgggaaaaagacggagccttggtgcaaaactaacaacacgagtgtgagaagagttgaaatcgcatcagccaaaggcaaagaacagctgactgagaaacttccagatgcaactaatgctcaagttctcagaaggtcagaacagtgtgagtatttggattacctcaacattgctcctgattctgggctgcatgggaaaggatatgcgcatggacacaaagatgttaacccacaagactggttcttctcttgtcacttttggtttgatcctgtgatgcctggatctttgggaattgagtcaatgttccagctcattgaggcatttgcggtggaccagaacataccgggagaatacaatgtgagcaatccgacctttgcccatgcccctggaaaaacggcgtggaagtaccgtggtcaattgacaccaaagaaccgtgcgatggactgtgaggtgcacatagtttcaatcacagcctctcctgaaaatggaggctacgttgacatagtggcagatggagcactttgggttgatggtctccgtgtgtatgaagccaaagaactcagagttcgtgttgtcagtgcaaaacctcaagccattccggatgttcaacaacagccacccagcgcaaaagcggaccctgggaaaactggagttgcactcagtccgactcagttgagagatgtcctgcttgaagtggacaatccattgtatcttggtgttgaaaactccaatttggtgcagtttgaatccaaacctgcaacttcttcaaggattgtcagtatcaaaccatgctccataagtgatcttggtgacaagtccttcatggaaacgtacaatgtgtcagcacctctgtacactggagcaatggccaagggaattgcgtctgcggaccttgtcattgctgctgggaagaggaagatattgggttcttttggagcgggtgggcttccaatgcaccatgtgagggcagctttggagaagatacaagcggctctgcctcaaggaccatatgctgtgaacctcattcattcaccttttgacagcaacttggaaaaggggaatgttgatctcttcctcgaaaagggcgttactgtggtggaggcttctgcattcatgaccctcactccccaagttgttcgttaccgtgcagccggactctcaaggaacgctgatgggagtgtcaacatcagaaaccgtatcattggaaaagtgtccagaacagaactcgccgaaatgttcatcagaccggctccggaacacctccttgagaaactcatagcttctggtgagataacacaagaacaagccgaacttgcccgtcgtgttcctgtcgcagacgacatcgctgttgaagctgattctggtggtcacactgacaaccgtcccatccacgtcatcttgcctttgatcatcaaccttaggaacagactgcacagagagtgtggttatcctgcgcaccttagagtcagagttggagctggaggcggtgttggctgcccacaagctgctgcggctgccctcacaatgggagctgccttcatagtgactgggactgtcaatcaagttgctaaacagtccgggacatgtgacaacgtgagaaaacaactcagtcaagccacctacagtgacatttgcatggctccagcagctgatatgtttgaggaaggtgtgaaactccaagttctcaagaagggaacaatgttcccatcaagagctaacaaattgtacgaactcttttgcaagtacgactctttcgattcaatgcctcctgctgaacttgaaaggatcgagaagaggatcttcaagagggcacttcaagaggtctgggaagagaccaaggacttttacatcaatggtttgaagaatccagagaagatacagagagcggaacatgaccccaaactcaagatgtctttgtgtttcagatggtatcttggtcttgcatcacgttgggccaacatgggtgctcctgatcgtgtcatggactatcaagtctggtgtggtccagccattggagccttcaatgacttcatcaaaggaacatatcttgatcctgctgtctctaatgagtacccatgtgttgtccagatcaaccttcagattttgcgtggtgcatgttacctgaggcgtcttaatgctctgagaaatgatccgaggattgatcttgagactgaagatgctgcctttgtctatgagccaacgaatgcgctttgagtagttagcttaatcacttaggtcacccagtccaagcccggcctagcacgatgatcatgagtgttgctattgatgtatgttaatactatacacagtcatcgtgtgtgttttataaaactgtaagcttaggatgtttgaggctaatgtaattagcactacaccgtaataaatgagaggtttactttatgttttaataatgttcttacccttgctgctctctaaactgtaatggcgtacggttagctaaactaaagtaaaaatcgattcgcttgagtaaaattagtgaccgggaaagatcatcgactactactgctcagagatgtaatcggtaattaagacttcaagctcaataattaattaggagtaaatctggcttcgaatttttaaattgtcaacttccaaagaaggattggcaagactcaatctcaattgcccaacaaacatatggctctttacaaatttggaatctctttttgatggcaagaacgtcgtaattcctctgtcgatctcatgtaattaccaaactcatctacttattactttctttatatgcacttactgatgcggccgcttaattaatcacgagtggatgactgtcacgactgactcatgactgactactagtgctagcctcgaggtcgacacaactttgtataataaagttgtctagacctaggagctgtgctgggtaactcacatgagtcactggtcacatcagcggccgcagcttatagtaaagatttttttgttaataaaatgaaagttaatatttatggatttatttgaacatatttacaagtttttgttaataaatttatttacagaagtgttaaatttgaaaatgtgttaaatgagagttaatatttatggatataatattactttatttaaaaataaaatgaatttatattaaaatatgatttggtaaaagatattataaagaggaacttggatgagaaagacgacgatgggcaaaagttgcatggcacaccgcttttgttcagtaacatctgcactgtggcgcctttttcacactcaccatgcatgctgccacgtcagctttcacactatgacaccactggccatacacgttgccacctcagctttctcctcttctcactatgacacgactggccatgcatgcatgcatgctgccacctcagctcccgcctcttcacccgtgtctttctctcatgtcgcagtgctgcgtgccaacctcttctctctataaatagagagaagagaatgatggttaaactcaaaccaaaacaagaaaacatacacaaatagcaaaacggatccacaaccaaaaatgcttcagcacacttggcttccgaagcctcccaatctgaccctcttgtcagatgaggttcatctctggaggattcctcttgaccagcctgagtcacaacttcaagaccttgctgccaccctgagcagtgatgaattggcgagggcaaacagattctactttccagaacacagaaggcgtttcactgctgggagaggcatcctcagatccatcttgggtggatacttgggagtggaaccgggtcaagtcaagtttgattatgagtcccgtgggaaaccgatccttggtgacagatttgctgagagtggactcctgttcaacttgtctcacagccagaaccttgccttgtgtgctgtcaactacacgcgtcaaataggcattgatcttgaatatctgcgtccaacatctgacttggagtctcttgcaaagaggttctttctcccaagagaatatgaactcttgaggtcactccctgatgagcagaaacagaagattttctttcgttactggacttgcaaagaggcttatctcaaagcaacgggagatggaatagccaaacttgaagagatcgagatagcactcaccccaacagaacctgccaagctccaaacagctcctgcgtggtctctgttggagcttgtgccagatgacaattgtgttgcagctgtggctgttgcgggttttggttggcagcccaagttctggcattactgagtagttagcttaatcacttaggtcacccagtccaagcccggcctagcacgatgatcatgagtgttgctattgatgtatgttaatactatacacagtcatcgtgtgtgttttataaaactgtaagcttaggatgtttgaggctaatgtaattagcactacaccgtaataaatgagaggtttactttatgttttaataatgttcttacccttgctgctctctaaactgtaatggcgtacggttagctaaactaaagtaaaaatcgattcgcttgagtaaaattagtgaccgggaaagatcatcgactactactgctcagagatgtaatcggtaattaagacttcaagctcaataattaattaggagtaaatctggcttcgaatttttaaattgtcaacttccaaagaaggattggcaagactcaatctcaattgcccaacaaacatatggctctttacaaatttggaatctctttttgatggcaagaacgtcgtaattcctctgtcgatctcatgtaattaccaaactcatctacttattactttctttatatgcacttactgatgcggccgcttaattaactactgtcactgaggccgtagacgagtacggactgatctaactagtgctagcctcgaggtcgacacccagctttcttgtacaaagtggttgcggccgcttaattaaatttaaattcaattaatgcaatcttgattttcaacaacgaaggtaatggcgtaaaagaaaaaatgtatgttattgtattgatctttcatgatgttgaagcgtgccataatatgatgatgtataattaaaatattaactgtcgcattttattgaaatggcactgttatttcaaccatatctttgattctgttacatgacacgactgcaagaagtaaataatagacgccgttgttaaagaattgctatcatatgtgcctaactagagggaatttgagcgtcagacctaatcaaatattacaaaatatctcactctgtcgccagcaatggtgtaatcagcgcagacaaatggcgtaaagatcgcggaaaaacctccccgagtggcatgatagctgcctctgtattgctgatttagtcagccttatttgacttaagggtgccctcgttagtgacaaattgctttcaaggagacagccatgccccacactttgttgaaaaacaaattgcctttggggagacggtaaagccagttgctcttcaataaggaatgtcgaggaggcaatgtaaccgcctctggtagtacacttctctaatccaaaaatcaatttgtattcaagataccgcaaaaaacttatggtttaaaccctgcaggactagtccagaaggtaattatccaagatgtagcatcaagaatccaatgtttacgggaaaaactatggaagtattatgtaagctcagcaagaagcagatcaatatgcggcacatatgcaacctatgttcaaaaatgaagaatgtacagatacaagatcctatactgccagaatacgaagaagaatacgtagaaattgaaaaagaagaaccaggcgaagaaaagaatcttgaagacgtaagcactgacgacaacaatgaaaagaagaagataaggtcggtgattgtgaaagagacatagaggacacatgtaaggtggaaaatgtaagggcggaaagtaaccttatcacaaaggaatcttatcccccactacttatccttttatatttttccgtgtcatttttgcccttgagttttcctatataaggaaccaagttcggcatttgtgaaaacaagaaaaaatttggtgtaagctattttctttgaagtactgaggatacaacttcagagaaatttgtaagtttgtaggtaccagatctggatcccaaaccatgtctccggagaggagaccagttgagattaggccagctacagcagctgatatggccgcggtttgtgatatcgttaaccattacattgagacgtctacagtgaactttaggacagagccacaaacaccacaagagtggattgatgatctagagaggttgcaagatagatacccttggttggttgctgaggttgagggtgttgtggctggtattgcttacgctgggccctggaaggctaggaacgcttacgattggacagttgagagtactgtttacgtgtcacataggcatcaaaggttgggcctaggatctacattgtacacacatttgcttaagtctatggaggcgcaaggttttaagtctgtggttgctgttataggccttccaaacgatccatctgttaggttgcatgaggctttgggatacacagcccggggtacattgcgcgcagctggatacaagcatggtggatggcatgatgttggtttttggcaaagggattttgagttgccagctcctccaaggccagttaggccagttacccaaatctgagtagttagcttaatcacctagagctcgatcggcggcaatagcttcttagcgccatcccgggttgatcctatctgtgttgaaatagttgcggtgggcaaggctctctttcagaaagacaggcggccaaaggaacccaaggtgaggtgggctatggctctcagttccttgtggaagcgcttggtctaaggtgcagaggtgttagcgggatgaagcaaaagtgtccgattgtaacaagatatgttgatcctacgtaaggatattaaagtatgtattcatcactaatataatcagtgtattccaatatgtactacgatttccaatgtctttattgtcgccgtatgtaatcggcgtcacaaaataatccccggtgactttcttttaatccaggatgaaataatatgttattataatttttgcgatttggtccgttataggaattgaagtgtgcttgaggtcggtcgccaccactcccatttcataattttacatgtatttgaaaaataaaaatttatggtattcaatttaaacacgtatacttgtaaagaatgatatcttgaaagaaatatagtttaaatatttattgataaaataacaagtcaggtattatagtccaagcaaaaacataaatttattgatgcaagtttaaattcagaaatatttcaataactgattatatcagctggtacattgccgtagatgaaagactgagtgcgatattatggtgtaatacataggaattcgtttaaacgatctgcgtctaattttcggtccaacttgcacaggaaagacgtcgaccgcggtagctcttgcccagcagactgggcttccagtcctttcgctcgatcgggtccaatgttgtcctcagctgtgaaccggaagcggacgaccaacagtggaagaactgaaaggaacgagccgtctataccttgatgatcggcctctggtgaagggtatcatcgcagccaagcaagctcatgaaaggctgatgggggaggtgtataattatgaggcccacggcgggcttattctttagggaggatctatctcgttgctcaagtgcatggcgcaaagcagttattggagtgcggattttcgttggcatattattcgccacgagttagcagacgaagagaccttcatgaacgtggccaaggccagagttaagcagatgttacgccctgctgcaggcctttctattatccaatagttggttgatctttggaaagagcctcggctgaggcccatactgaaagagatcgatggatatcgatatgccatgttgtttgctagccagaaccagatcacatccgatatgctattgcagcttgacgcagatatggaggataagttgattcatgggatcgctcaggagtagctcatccatgcacgccgacaagaacagaaattccgtcgagttaacgcagccgcttacgacggattcgaaggtcatccattcggaatgtattagtttgcaccagctccgcgtcacacctgtcttcatttgaataagatgttagcaattgtttttagctttgtcttgttgtggcagggcggcaagtgcttcagacatcattctgttttcaaattttatgctggagaacagcttcttaattcctttggaaataatagactgcgtcttaaaattcagatgtctggatatagatatgattgtaaaataacctatttaagtgtcatttagaacataagttttatgaatgttcttccattttcgtcatcgaacgaataagagtaaatacaccttttttaacattacaaataagttcttatacgttgtttatacaccgggaatcatttccattattttcgcgcaaaagtcacggatattcgtgaaagcgacataaactgcgaaatttgcggggagtgtcttgagtttgcctcgaggctagcgcatgcacatagacacacacatcatctcattgatgcttggtaataattgtcattagattgtttttatgcatagatgcactcgaaatcagccaattttagacaagtatcaaacggatgtgacttcagtacattaaaaacgtccgcaatgtgttattaagttgtctaagcgtcaatttgatttacaattgaatatatcctgccccagccagccaacagctcgatttacaattgaatatatcctgccggccggcccacgcgtgtcgaggaattctgatctggcccccatttggacgtgaatgtagacacgtcgaaataaagatttccgaattagaataatttgtttattgctttcgcctataaatacgacggatcgtaatttgtcgttttatcaaaatgtactttcattttataataacgctgcggacatctacatttttgaattgaaaaaaaattggtaattactctttctttttctccatattgaccatcatactcattgctgatccatgtagatttcccggacatgaagccatttacaattgaatatatcctgccgccgctgccgctttgcacccggtggagcttgcatgttggtttctacgcagaactgagccggttaggcagataatttccattgagaactgagccatgtgcaccttccccccaacacggtgagcgacggggcaacggagtgatccacatgggacttttaaacatcatccgtcggatggcgttgcgagagaagcagtcgatccgtgagatcagccgacgcaccgggcaggcgcgcaacacgatcgcaaagtatttgaacgcaggtacaatcgagccgacgttcacgcggaacgaccaagcaagcttggctgccatttttggggtgaggccgttcgcggccgaggggcgcagcccctggggggatgggaggcccgcgttagcgggccgggagggttcgagaagggggggcaccccccttcggcgtgcgcggtcacgcgcacagggcgcagccctggttaaaaacaaggtttataaatattggtttaaaagcaggttaaaagacaggttagcggtggccgaaaaacgggcggaaacccttgcaaatgctggattttctgcctgtggacagcccctcaaatgtcaataggtgcgcccctcatctgtcagcactctgcccctcaagtgtcaaggatcgcgcccctcatctgtcagtagtcgcgcccctcaagtgtcaataccgcagggcacttatccccaggcttgtccacatcatctgtgggaaactcgcgtaaaatcaggcgttttcgccgatttgcgaggctggccagctccacgtcgccggccgaaatcgagcctgcccctcatctgtcaacgccgcgccgggtgagtcggcccctcaagtgtcaacgtccgcccctcatctgtcagtgagggccaagttttccgcgaggtatccacaacgccggcggccgcggtgtctcgcacacggcttcgacggcgtttctggcgcgtttgcagggccatagacggccgccagcccagcggcgagggcaaccagcccggtgagcgtcggaaagggtcgacggatcttttccgctgcataaccctgcttcggggtcattatagcgattttttcggtatatccatcctttttcgcacgatatacaggattttgccaaagggttcgtgtagactttccttggtgtatccaacggcgtcagccgggcaggataggtgaagtaggcccacccgcgagcgggtgttccttcttcactgtcccttattcgcacctggcggtgctcaacgggaatcctgctctgcgaggctggccggctaccgccggcgtaacagatgagggcaagcggatggctgatgaaaccaagccaaccaggaagggcagcccacctatcaaggtgtactgccttccagacgaacgaagagcgattgaggaaaaggcggcggcggccggcatgagcctgtcggcctacctgctggccgtcggccagggctacaaaatcacgggcgtcgtggactatgagcacgtccgcgagctggcccgcatcaatggcgacctgggccgcctgggcggcctgctgaaactctggctcaccgacgacccgcgcacggcgcggttcggtgatgccacgatcctcgccctgctggcgaagatcgaagagaagcaggacgagcttggcaaggtcatgatgggcgtggtccgcccgagggcagagccatgacttttttagccgctaaaacggccggggggtgcgcgtgattgccaagcacgtccccatgcgctccatcaagaagagcgacttcgcggagctggtattcgtgcagggcaagattcggaataccaagtacgagaaggacggccagacggtctacgggaccgacttcattgccgataaggtggattatctggacaccaaggcaccaggcgggtcaaatcaggaataagggcacattgccccggcgtgagtcggggcaatcccgcaaggagggtgaatgaatcggacgtttgaccggaaggcatacaggcaagaactgatcgacgcggggttttccgccgaggatgccgaaaccatcgcaagccgcaccgtcatgcgtgcgccccgcgaaaccttccagtccgtcggctcgatggtccagcaagctacggccaagatcgagcgcgacagcgtgcaactggctccccctgccctgcccgcgccatcggccgccgtggagcgttcgcgtcgtctcgaacaggaggcggcaggtttggcgaagtcgatgaccatcgacacgcgaggaactatgacgaccaagaagcgaaaaaccgccggcgaggacctggcaaaacaggtcagcgaggccaagcaggccgcgttgctgaaacacacgaagcagcagatcaaggaaatgcagctttccttgttcgatattgcgccgtggccggacacgatgcgagcgatgccaaacgacacggcccgctctgccctgttcaccacgcgcaacaagaaaatcccgcgcgaggcgctgcaaaacaaggtcattttccacgtcaacaaggacgtgaagatcacctacaccggcgtcgagctgcgggccgacgatgacgaactggtgtggcagcaggtgttggagtacgcgaagcgcacccctatcggcgagccgatcaccttcacgttctacgagctttgccaggacctgggctggtcgatcaatggccggtattacacgaaggccgaggaatgcctgtcgcgcctacaggcgacggcgatgggcttcacgtccgaccgcgttgggcacctggaatcggtgtcgctgctgcaccgcttccgcgtcctggaccgtggcaagaaaacgtcccgttgccaggtcctgatcgacgaggaaatcgtcgtgctgtttgctggcgaccactacacgaaattcatatgggagaagtaccgcaagctgtcgccgacggcccgacggatgttcgactatttcagctcgcaccgggagccgtacccgctcaagctggaaaccttccgcctcatgtgcggatcggattccacccgcgtgaagaagtggcgcgagcaggtcggcgaagcctgcgaagagttgcgaggcagcggcctggtggaacacgcctgggtcaatgatgacctggtgcattgcaaacgctagggccttgtggggtcagttccggctgggggttcagcagccagcgctttactggcatttcaggaacaagcgggcactgctcgacgcacttgcttcgctcagtatcgctcgggacgcacggcgcgctctacgaactgccgataaacagaggattaaaattgacaattgtgattaaggctcagattcgacggcttggagcggccgacgtgcaggatttccgcgagatccgattgtcggccctgaagaaagctccagagatgttcgggtccgtttacgagcacgaggagaaaaagcccatggaggcgttcgctgaacggttgcgagatgccgtggcattcggcgcctacatcgacggcgagatcattgggctgtcggtcttcaaacaggaggacggccccaaggacgctcacaaggcgcatctgtccggcgttttcgtggagcccgaacagcgaggccgaggggtcgccggtatgctgctgcgggcgttgccggcgggtttattgctcgtgatgatcgtccgacagattccaacgggaatctggtggatgcgcatcttcatcctcggcgcacttaatatttcgctattctggagcttgttgtttatttcggtctaccgcctgccgggcggggtcgcggcgacggtaggcgctgtgcagccgctgatggtcgtgttcatctctgccgctctgctaggtagcccgatacgattgatggcggtcctgggggctatttgcggaactgcgggcgtggcgctgttggtgttgacaccaaacgcagcgctagatcctgtcggcgtcgcagcgggcctggcgggggcggtttccatggcgttcggaaccgtgctgacccgcaagtggcaacctcccgtgcctctgctcacctttaccgcctggcaactggcggccggaggacttctgctcgttccagtagctttagtgtttgatccgccaatcccgatgcctacaggaaccaatgttctcggcctggcgtggctcggcctgatcggagcgggtttaacctacttcctttggttccgggggatctcgcgactcgaacctacagttgtttccttactgggctttctcagcccccgagcgcttagtgggaatttgtaccccttatcgaaccgggagcacaggatgacgcctaacaattcattcaagccgacaccgcttcgcggcgcggcttaattcaggagttaaacatcatgagggaagcggtgatcgccgaagtatcgactcaactatcagaggtagttggcgtcatcgagcgccatctcgaaccgacgttgctggccgtacatttgtacggctccgcagtggatggcggcctgaagccacacagtgatattgatttgctggttacggtgaccgtaaggcttgatgaaacaacgcggcgagctttgatcaacgaccttttggaaacttcggcttcccctggagagagcgagattctccgcgctgtagaagtcaccattgttgtgcacgacgacatcattccgtggcgttatccagctaagcgcgaactgcaatttggagaatggcagcgcaatgacattcttgcaggtatcttcgagccagccacgatcgacattgatctggctatcttgctgacaaaagcaagagaacatagcgttgccttggtaggtccagcggcggaggaactctttgatccggttcctgaacaggatctatttgaggcgctaaatgaaaccttaacgctatggaactcgccgcccgactgggctggcgatgagcgaaatgtagtgcttacgttgtcccgcatttggtacagcgcagtaaccggcaaaatcgcgccgaaggatgtcgctgccgactgggcaatggagcgcctgccggcccagtatcagcccgtcatacttgaagctaggcaggcttatcttggacaagaagatcgcttggcctcgcgcgcagatcagttggaagaatttgttcactacgtgaaaggcgagatcaccaaggtagtcggcaaataatgtctaacaattcgttcaagccgacgccgcttcgcggcgcggcttaactcaagcgttagagagctggggaagactatgcgcgatctgttgaaggtggttctaagcctcgtcttgcgatggcatttcgatccattcccattccgcgctcaagatggcttcccctcggcagttcatcagggctaaatcaatctagccgacttgtccggtgaaatgggctgcactccaacagaaacaatcaaacaaacatacacagcgacttattcacacgagctca

SEQ ID NO: 63 - DNA, 22042 bp, Artificial sequence
  plasmid pDAB108224
aattacaacggtatatatcctgccagtcagcatcatcacaccaaaagttaggcccgaatagtttgaaattagaaagctcgcaattgaggtctacaggccaaattcgctcttagccgtacaatattactcaccggatcctaaccggtttaattaaggcgcgccatgcccgggcaagcggccgcacaagtttgtacaaaaaagcaggcttctagtgatcagcagagtgagtcctgagtcctgagtatcactcatcttaattaagcggccgcatcagtaagtgcatataaagaaagtaataagtagatgagtttggtaattacatgagatcgacagaggaattacgacgttcttgccatcaaaaagagattccaaatttgtaaagagccatatgtttgttgggcaattgagattgagtcttgccaatccttctttggaagttgacaatttaaaaattcgaagccagatttactcctaattaattattgagcttgaagtcttaattaccgattacatctctgagcagtagtagtcgatgatctttcccggtcactaattttactcaagcgaatcgatttttactttagtttagctaaccgtacgccattacagtttagagagcagcaagggtaagaacattattaaaacataaagtaaacctctcatttattacggtgtagtgctaattacattagcctcaaacatcctaagcttacagttttataaaacacacacgatgactgtgtatagtattaacatacatcaatagcaacactcatgatcatcgtgctaggccgggcttggactgggtgacctaagtgattaagctaactactcagaacgcaagtgagtctgtcgcaatgacagaggcttgaacatcaatgaagagatcaccttgttcgttgtggaactgaagtgcatgtttgtgctggctatgtccaccactctgattggatctgagggtgatgtagaagggtttgtcttgtgggaccggtctgtgttggactatcctctgaatggagttcgggagtgcagcttgtcccagcgttctcctcacccagaccaacattgcttgaaaggcaagatcattgacaaagggatcatgtgcatcagtgtcagttgcaaactctcctctggctgcatctgatccaggaacagcagaacacttggcaacaagctggctcttggtgcagctgagaacgtcatcaatgcctctgaacgcaggaccatgaaagagagtcttgccatcatagactgacccttgcaaagcaggatctgcatcaaggctcggaggctgcatggttgcattggcaggtggagcaccttggttggacaacactatgacagctctgtaggctggaacaagttttccacttgagaacgtcttgagcgtcgcttggacattcaccctcccactcggagcagtggacggtgtgagggtcacttcacagttgacgtctccatcaacagtgacacctttgaagagctgtgcgtcatctatggcccagagagagtagccagggaagagtccaaggcaggtctcagcaaggctcccaatagcaagggtcattggcaacacccttctgccttgtatgacatgatcctccaagaagggattggacttggcactgatctttctatgcagggtgatcgtgtcacttccaactttcttggatggtgtcctccagtttccaacaaggatctcagcaggacttgatcccaacacaatcctcgcaactgtatcagcacctccttcacgaggaatgatctgaactcccatttcttgaaactgtttcttgagttgaggtgtcaccatcccaccatcccagggaccaaagcagatggacttgacactgacatccttcgcaagttccaaacccatcttgttgagagcttcgtttgccatcgcatagtcagactgaccaacattgccgtggaaaccagcaagggagctgaagagaaccatgtgtttgaggttggcacgatcaactgcagccagaagattctccaacccagtgactttggtcccaaagacagcatcaaactcgtcagggagtttcttctctatgagacgatcacggagcacaccagaagcgtgaacgattccactaactctggcaccaagctgggactctgcatccctaactgctttggcaacatctgcagcagagttcacatcacaagagctgtagatcgctttgccacccagagcttcaatggcagcaatggagcttctcacttcacgagcaccaagaacagatcccacaagtttcgtgacagcccttggagtgggtttgggtccttcaccagcactgaaggccctcttcaactcttgggtggcagctttctgcacagccttctcatcagtgatgccagcacaccatgctggttcagacgcagaaactttgctacgacccaacagaatgtacttgcctccagcaatctgacgcgtgatctcacggatgcaaagaggtgtgatcccacgagcacctccagaaaccagaagcacatcgtctttcgctatctgtctctgagggttcccagtctccaacttggcagctctgattgtgcatctttgctggtttgctccaatcccaacctctctgattctgatgtcagcacacgccatctccctaactatggcaactgcagcatcttctgggtgcatcccttgagcaatgtccacaccacggctgaacacatcagattctgaccactccaaccctattgtcttgcagagtccaaagatcgctccacgctgtgctctcttgagtgcgtcagaagtgccttgagaggtgaatccaagtctgccgtcaagcctagccacaccgatgaaggcaggacgacctccagccacagcagtgcagagagaggctttggcaaacttcgcacacatgagtgtgaaacccagtatctcagctggttcaaacctttctgcttgctggcttatgaagcctcccaacgctccaaatctttgctcagcctctttgatggccttctcagctgattctgctgaaaggtccttagccagaacatgacgaatggcagctgcaccagctctctgagccaactgcaatccctcaaaggtcaagacaactgcacaggctcccaacaccctcacaagagcaagtgtcaactctgagccatcgtcaacgacaagaactggacggttctccggtctttccagaatcagttcatctggccttctgatgtcaaccacctttgcgtgcatcagtgacaaatcgtcacagtcagcaccatgaactgaatcaatcttcacagctggtgcagcaccggcacttgcaggagcggctgcagccggagcaggggctgatccaccagctatctcagccttcatggcatcgaccacttctccaaccgttctggtccttgacaaagcatcgacatctttggcctcaacgttcagcatggcttgaacctcagaaaggatttccacacgcttgatgctatcaatcccaagctctgtttccaactccatgtctgactctatcatgtcagtctcgtatccagtctttgcagccaaaacctccatcacaacagtttcagctttttcaaggagttcgttgctgacagctggtgccgcggcagcgggagcaggagcggctgcagctggcgcaggagcagaacccccagctatctcagccttcatggcatcaaccacctctcccaccgtccttgttctggaaagagcatcaacatctttggcctccacattcaacatcgcttgaacctcagagaggatttcaacacgtttgatggagtcaattccaagctcggtctccagttccatgtcagattcaatcatgtcggtctcatagccagttttcgcagcaaggacttccatcacaactgtctcagccttttccaggagttctgaggagacggccggtgcggctgcagctggagccggtgccgcggctgcgggtgcaggagcggctgcagctggcgcaggcgcggaacttccagcgatctccgccttcatcgcatcaacgacctcaccaactgttctggtccttgagagggcatccacatccttagcctccacattgagcattgcttggacttcactgaggatctcaacacgcttgatgctgtcaatgcccaattccgtctcaagttccatgtcagactcaatcatgtcagtctcatagccggtttttgcagccagcacttccatgacaactgtttcagccttctcaagcaattcgttgctgacagctggtgccgcggctgcgggtgcaggtgcggcagctgccggcgcaggagcagagcctccagcaatctcagccttcatcgcatcgacaacttcccccacagttcttgtcctactgagtgcatcaacatctttagcctcaacgttgagcatggcttgcacctcagagaggatctccactctcttgatggaatctattccaagttcggtctccaattccatgtctgactcaatcatgtccgtttcgtaaccagtttttgcagcaaggacttccatcacaactgtttcggctttctccagcaactcattgctgacggcaggagcggctgcagctggagcaggtgccgcggcagcaggtgcaggtgcggctgcagctggcgcactagcagagcttccggcaatttcagccttcatggcgtccacgacctcaccgactgttctggttcttgaaagcgcatcgacatcttttgcctccacgttcaacatagcttggacctcagacaagatttcaacacgtttgatgctatctattcccaactcggtttcaagctccatgtcactttcaatcatgtcggtctcgtaaccagtcttagctgcgagcacctccatcacaaccgtctcggccttttccaggagttcggatgaaacagctggcgcgggcgcggccggtgctggtgcagctggagctggagctgcggctgccggtgcaggtgccgcggcagctggcgcaggcgcgctccctccagcaatctccgccttcatggcatccacaacctcacccactgtccttgttcttgaaagtgcatcaacatccttagcttcaacattgagcatggcttggacttcactcaggatctccactcttttgatggaatcgatcccaagctctgtctccaattccatatcagattcaatcatgtcggtctcatagccagtctttgcagccaaaacctccatcacaaccgtctcagccttctccaagagttctgaagaaacggcaggtgcaggtgcagctggagcaggtgccgcggctgcgggtgcaggagcggctgcagctggcgcgggcgcagaccctccagcaatttcagccttcatggcatccacaacctcaccaacggtcctcgttctggacagagcatcaacatccttcgcttccacgttcagcatagcttggacctcactgaggatttcaacacgtttgatgctgtctatcccaagttctgtctccaattccatgtcagactcaatcatgtcagtctcatagccggttttagctgccaagacctccatcacgacggtctcagctttttcaaggagttcgtttgagacggccggagcggctgcagctggagctggagccgcggcagcgggaccaggagcggcagcggccggcgcaggagcggagcctccagctatctcagccttcatggcattgacaacctcaccgacagttctggtccttgagagagcatccacatccttagcttccacattgagcatggcttggacttcactgaggatttccacacgcttgatggaatcaattccaagctccgtctcaagctccatgtctgattctatcatgtcagtttcgtagccagttttggcagcaaggacttccatcacaacagtttctgccttttcgagcagctcattagaaacagctggtgcagctgcagctggagccgctttagccggtgcaggtgcggcagctgccggcgccggagcggaagaaccagcgatttctgccttcatagcgttgacaacttcacccactgttctcgtcctagagagagcatcaacatctttcgcctcaacgttaagcatagcttggacttcagaaagaatttcaaccctcttgatgctgtcaattcccaactcagtctcaagctccatgtccgcctcaatcatgtctgtttcgtatccagtcttggcagcgagaacctccatcacaactgtctcagctttctcaagcaactcgttggacacggcgggagcaggagcacttgcaacgggagcggcaggggcagcggctttaacaggcgccggagcagtctgttgctgttgctgttgctgaagggaagaagcatcaacacttccataaccatccagctcagccagcatggacttgaggatggcacgatgtttctccacaacagcagtgtcaactgcaggcttggctgaagctgcagcagtcttggcttcctccttggcagcagcaagtttggagttggcttctgcagctgcacgtttggcgtcgtcaagctgcctctgagcgtcttgaagctccttctgaagcctttcagcctccctcttggcagcttcgtcaaccacaggttcaggagccttgatgagtggtgcagcacccttgaggtatgtgacacatcttccgtcgttcatggcagcatccctcactttcttggtcttgtcactgacataggtggcagctgaaagtctgagtgtggttctctttttcttgatggcttgcatcctcgtggcatcaggagcatcccacttgtcaaacccttgaagattgacaccagccacaaccagctgaactgcagcatccctcaactgtatgtcagagtccgtgccagaagctgggttcacagacactgtgacaacagacgggtcatctttgagggtttcagaaacaagtttgctgagaacttgtttcggtccaaactcaacaaagattctcgcaccagcttggtgcatgttcctcacttgggtcaggaacttcacagatgaggtcatgtgttgagtgagcatctctctggcatccgtcggataggtctctccagaaacattgctgaagagctttgtttctgctttgggtgtacggaaggaaaccttggatatgacatctttgaaagctgagctggcattttccatctgtggagaatggaaggcagactcacaagcaagaggcacaactctgaacccttccttctgcaatctggcactttcagcttgaatcccttcaacagacccagtaatgacagtctgagacggagagtttgagtttccaagccagacgttggcagcttgaaccttgatgttctctgcgttgggtcctatgacagctgccatgcaacctttgggtgtggcaggtgcatctttgcctcccatgatccttgcccttctgcaaacaagttcaaacaactcatctctgtcaacacaaccagctgcatagagcgcagcaaactcacccaagctgtgtccagctgcaaagtctggagtgaatccagcttccttgaaaatctcaaaggcaccaagagcacatgccagggttgacggctggctgtatgctgtgagtgagattttcttgtgatcttgttctggctcacgttcgtacggtttccttgggtacaggacttgagagactctttcaaagtctttgtcacttccagcaaccttggactgtgcagcgtccattgcagcaatggactgtctgaactgaggccagttcatcgcaacttcactgaacatgtgtgtgtactgagcaccttgtccagagaagagtgcagcaacagcaccattggtggcaatgcctttggcacggaaagaaactccttctctcggaagcctccacgcttctttggtcacatctttggcaaactgagcacatatagcacgaagcgtggagcacgcatcctccgcatctttgaccaagaatcccagtctcgcattggtcgcaggtatgctcccagggaacttgaactgttctccaaacttgacacacttgatgtaggcagtattcttgactgtctcattctccttgatcgcagcttcaaactctttcagctgagcttcacaaaggctctgcaacgcagcaggagttgcagccatcatcaacaccggttgtggacgtttgttgagtctgtacgctgtcgtgtgctctggttcagcctcttccaacactgcatggtagttggcacctccaaagccaaagctggatattccagcacgtctcggaacaccaggtggagggaaccagggtctgttcatcgtgttgatgtagagggatgactcattgatgggagtgttgtcatagagattgggtggattgtccacattgatcgttccaggcaaagtcttgtgtttgagagccatgatgaccttgatcattccagcaagaccagcaacagccttcaaatgaccaatactggacttgatacttccaactgcaactttctctgtgttcccttcaccatacgctttgtcaaacaagttcctcaacgcagtcaactcaatcctatctccaactggagtgccagtcccatgaccctcaaccaaagtgacagtggcagggtcaacgcaggcacgattgtatgcacgtctcaaggcttcctcttgaccactgattgtgggagtgtagatgccagctgctttgccatcacttgagcttgcacaaccacgaatcacagcatgaatctcatcaccatccctcactgcatctgcataacgtttgagcaccaacatggctgatccctcaccaatgagcatccctttcgttttctcatcatacgctctcacacttgggtccgtgctgaacacaggtgtctttgagaaagccatgtacatcccaatggagttgtctgtgcaggttgcaccagtgaccatcatgtcgcagtcaccatagagcagttcatcaatcgcaaccttgactgctatcaaggagcttgcacatgcagcatccacaacgcagttcatgccatccaagttgaatgtgttggtgcatctgccagcagtgacattcccaaggaatccagggaaagagtcaagtctccattctgggaagttcgctttgtacttctccacagccactttgacatcttcctctggcatccccatctttctcaagactttctccacaaccacatagttgagtctgctgtagaactcatgtgaactcttctgtccacctccaatgccaagcacgcatcctatgtttttcttctcctttccaagtgcatcaatcccagcatcttgaagtgcttctttgaccttgagaagtgagatggtctgattcgcatcagaatcttccatctggaacatgttgagaccaaactcacgcgcatcaaagtcatactcaggaatgaaacctcctctcttgcagtagattttgtcctttgtggtcttgactgggtcaaagtacgcagtcacatcaacacgatcctcaggaagatcagacaggcaatcaatgccagcccttatggtctcccatgactctctcaccgtggttccacaaggaagtatggcgctcatgcctatgatcgcaatcctcgtgtccatctcacctcctttctgctcttgcagcctcgctgccatttttggttgtggatccgttttgctatttgtgtatgttttcttgttttggtttgagtttaaccatcattctcttctctctatttatagagagaagaggttggcacgcagcactgcgacatgagagaaagacacgggtgaagaggcgggagctgaggtggcagcatgcatgcatgcatggccagtcgtgtcatagtgagaagaggagaaagctgaggtggcaacgtgtatggccagtggtgtcatagtgtgaaagctgacgtggcagcatgcatggtgagtgtgaaaaaggcgccacagtgcagatgttactgaacaaaagcggtgtgccatgcaacttttgcccatcgtcgtctttctcatccaagttcctctttataatatcttttaccaaatcatattttaatataaattcattttatttttaaataaagtaatattatatccataaatattaactctcatttaacacattttcaaatttaacacttctgtaaataaatttattaacaaaaacttgtaaatatgttcaaataaatccataaatattaactttcattttattaacaaaaaaatctttactataagctgcggccgcttaattaagatgagtgatactcaggactcaggactcactctgctgatcactagtgctagcctcgaggtcgacacaactttgtatacaaaagttgtctaggatctgcttttacatgcgagacacatcttctaaagtaattttaataatagttactatattcaagatttcatatatcaaatactcaatattacttctaaaaaattaattagatataattaaaatattacttttttaattttaagtttaattgttgaatttgtgactattgatttattattctactatgtttaaattgttttatagatagtttaaagtaaatataagtaatgtagtagagtgttagagtgttaccctaaaccataaactataagatttatggtggactaattttcatatatttcttattgcttttaccttttcttggtatgtaagtccgtaactggaattactgtgggttgccatgacactctgtggtcttttggttcatgcatggatcttgcgcaagaaaaagacaaagaacaaagaaaaaagacaaaacagagagacaaaacgcaatcacacaaccaactcaaattagtcactggctgatcaagatcgccgcgtccatgtatgtctaaatgccatgcaaagcaacacgtgcttaacatgcactttaaatggctcacccatctcaacccacacacaaacacattgcctttttcttcatcatcaccacaaccacctgtatatattcattctcttccgccacctcaatttcttcacttcaacacacgtcaacctgcatatgcgtgtcatcccatgcccaaatctccatgcatgttccaaccaccttctctcttatataatacctataaatacctctaatatcactcacttctttcatcatccatccatccagagtactactactctactactataataccccaacccaactcatattcaatactactctaggatccacaaccaaaaatgcttcagcacacttggcttccgaagcctcccaatctgaccctcttgtcagatgaggttcatctctggaggattcctcttgaccagcctgagtcacaacttcaagaccttgctgccaccctgagcagtgatgaattggcgagggcaaacagattctactttccagaacacagaaggcgtttcactgctgggagaggcatcctcagatccatcttgggtggatacttgggagtggaaccgggtcaagtcaagtttgattatgagtcccgtgggaaaccgatccttggtgacagatttgctgagagtggactcctgttcaacttgtctcacagccagaaccttgccttgtgtgctgtcaactacacgcgtcaaataggcattgatcttgaatatctgcgtccaacatctgacttggagtctcttgcaaagaggttctttctcccaagagaatatgaactcttgaggtcactccctgatgagcagaaacagaagattttctttcgttactggacttgcaaagaggcttatctcaaagcaacgggagatggaatagccaaacttgaagagatcgagatagcactcaccccaacagaacctgccaagctccaaacagctcctgcgtggtctctgttggagcttgtgccagatgacaattgtgttgcagctgtggctgttgcgggttttggttggcagcccaagttctggcattactgagtagttagcttaatcacttaggtcacctcgagtatcaaaatctatttagaaatacacaatattttgttgcaggcttgctggagaatcgatctgctatcataaaaattacaaaaaaattttatttgcctcaattattttaggattggtattaaggacgcttaaattatttgtcgggtcactacgcatcattgtgattgagaagatcagcgatacgaaatattcgtagtactatcgataatttatttgaaaattcataagaaaagcaaacgttacatgaattgatgaaacaatacaaagacagataaagccacgcacatttaggatattggccgagattactgaatattgagtaagatcacggaatttctgacaggagcatgtcttcaattcagcccaaatggcagttgaaatactcaaaccgccccatatgcaggagcggatcattcattgtttgtttggttgcctttgccaacatgggagtccaaggttggcgcgccgaattcgcggccgcttaattaactactgtcactgaggccgtagacgagtacggactgatctaactagtgctagcctcgaggtcgacacccagctttcttgtacaaagtggttgcggccgcttaattaaatttaaattcaattaatgcaatcttgattttcaacaacgaaggtaatggcgtaaaagaaaaaatgtatgttattgtattgatctttcatgatgttgaagcgtgccataatatgatgatgtataattaaaatattaactgtcgcattttattgaaatggcactgttatttcaaccatatctttgattctgttacatgacacgactgcaagaagtaaataatagacgccgttgttaaagaattgctatcatatgtgcctaactagagggaatttgagcgtcagacctaatcaaatattacaaaatatctcactctgtcgccagcaatggtgtaatcagcgcagacaaatggcgtaaagatcgcggaaaaacctccccgagtggcatgatagctgcctctgtattgctgatttagtcagccttatttgacttaagggtgccctcgttagtgacaaattgctttcaaggagacagccatgccccacactttgttgaaaaacaaattgcctttggggagacggtaaagccagttgctcttcaataaggaatgtcgaggaggcaatgtaaccgcctctggtagtacacttctctaatccaaaaatcaatttgtattcaagataccgcaaaaaacttatggtttaaaccctgcaggactagtccagaaggtaattatccaagatgtagcatcaagaatccaatgtttacgggaaaaactatggaagtattatgtaagctcagcaagaagcagatcaatatgcggcacatatgcaacctatgttcaaaaatgaagaatgtacagatacaagatcctatactgccagaatacgaagaagaatacgtagaaattgaaaaagaagaaccaggcgaagaaaagaatcttgaagacgtaagcactgacgacaacaatgaaaagaagaagataaggtcggtgattgtgaaagagacatagaggacacatgtaaggtggaaaatgtaagggcggaaagtaaccttatcacaaaggaatcttatcccccactacttatccttttatatttttccgtgtcatttttgcccttgagttttcctatataaggaaccaagttcggcatttgtgaaaacaagaaaaaatttggtgtaagctattttctttgaagtactgaggatacaacttcagagaaatttgtaagtttgtaggtaccagatctggatcccaaaccatgtctccggagaggagaccagttgagattaggccagctacagcagctgatatggccgcggtttgtgatatcgttaaccattacattgagacgtctacagtgaactttaggacagagccacaaacaccacaagagtggattgatgatctagagaggttgcaagatagatacccttggttggttgctgaggttgagggtgttgtggctggtattgcttacgctgggccctggaaggctaggaacgcttacgattggacagttgagagtactgtttacgtgtcacataggcatcaaaggttgggcctaggatctacattgtacacacatttgcttaagtctatggaggcgcaaggttttaagtctgtggttgctgttataggccttccaaacgatccatctgttaggttgcatgaggctttgggatacacagcccggggtacattgcgcgcagctggatacaagcatggtggatggcatgatgttggtttttggcaaagggattttgagttgccagctcctccaaggccagttaggccagttacccaaatctgagtagttagcttaatcacctagagctcgatcggcggcaatagcttcttagcgccatcccgggttgatcctatctgtgttgaaatagttgcggtgggcaaggctctctttcagaaagacaggcggccaaaggaacccaaggtgaggtgggctatggctctcagttccttgtggaagcgcttggtctaaggtgcagaggtgttagcgggatgaagcaaaagtgtccgattgtaacaagatatgttgatcctacgtaaggatattaaagtatgtattcatcactaatataatcagtgtattccaatatgtactacgatttccaatgtctttattgtcgccgtatgtaatcggcgtcacaaaataatccccggtgactttcttttaatccaggatgaaataatatgttattataatttttgcgatttggtccgttataggaattgaagtgtgcttgaggtcggtcgccaccactcccatttcataattttacatgtatttgaaaaataaaaatttatggtattcaatttaaacacgtatacttgtaaagaatgatatcttgaaagaaatatagtttaaatatttattgataaaataacaagtcaggtattatagtccaagcaaaaacataaatttattgatgcaagtttaaattcagaaatatttcaataactgattatatcagctggtacattgccgtagatgaaagactgagtgcgatattatggtgtaatacataggaattcgtttaaacgatctgcgtctaattttcggtccaacttgcacaggaaagacgtcgaccgcggtagctcttgcccagcagactgggcttccagtcctttcgctcgatcgggtccaatgttgtcctcagctgtgaaccggaagcggacgaccaacagtggaagaactgaaaggaacgagccgtctataccttgatgatcggcctctggtgaagggtatcatcgcagccaagcaagctcatgaaaggctgatgggggaggtgtataattatgaggcccacggcgggcttattctttagggaggatctatctcgttgctcaagtgcatggcgcaaagcagttattggagtgcggattttcgttggcatattattcgccacgagttagcagacgaagagaccttcatgaacgtggccaaggccagagttaagcagatgttacgccctgctgcaggcctttctattatccaatagttggttgatctttggaaagagcctcggctgaggcccatactgaaagagatcgatggatatcgatatgccatgttgtttgctagccagaaccagatcacatccgatatgctattgcagcttgacgcagatatggaggataagttgattcatgggatcgctcaggagtagctcatccatgcacgccgacaagaacagaaattccgtcgagttaacgcagccgcttacgacggattcgaaggtcatccattcggaatgtattagtttgcaccagctccgcgtcacacctgtcttcatttgaataagatgttagcaattgtttttagctttgtcttgttgtggcagggcggcaagtgcttcagacatcattctgttttcaaattttatgctggagaacagcttcttaattcctttggaaataatagactgcgtcttaaaattcagatgtctggatatagatatgattgtaaaataacctatttaagtgtcatttagaacataagttttatgaatgttcttccattttcgtcatcgaacgaataagagtaaatacaccttttttaacattacaaataagttcttatacgttgtttatacaccgggaatcatttccattattttcgcgcaaaagtcacggatattcgtgaaagcgacataaactgcgaaatttgcggggagtgtcttgagtttgcctcgaggctagcgcatgcacatagacacacacatcatctcattgatgcttggtaataattgtcattagattgtttttatgcatagatgcactcgaaatcagccaattttagacaagtatcaaacggatgtgacttcagtacattaaaaacgtccgcaatgtgttattaagttgtctaagcgtcaatttgatttacaattgaatatatcctgccccagccagccaacagctcgatttacaattgaatatatcctgccggccggcccacgcgtgtcgaggaattctgatctggcccccatttggacgtgaatgtagacacgtcgaaataaagatttccgaattagaataatttgtttattgctttcgcctataaatacgacggatcgtaatttgtcgttttatcaaaatgtactttcattttataataacgctgcggacatctacatttttgaattgaaaaaaaattggtaattactctttctttttctccatattgaccatcatactcattgctgatccatgtagatttcccggacatgaagccatttacaattgaatatatcctgccgccgctgccgctttgcacccggtggagcttgcatgttggtttctacgcagaactgagccggttaggcagataatttccattgagaactgagccatgtgcaccttccccccaacacggtgagcgacggggcaacggagtgatccacatgggacttttaaacatcatccgtcggatggcgttgcgagagaagcagtcgatccgtgagatcagccgacgcaccgggcaggcgcgcaacacgatcgcaaagtatttgaacgcaggtacaatcgagccgacgttcacgcggaacgaccaagcaagcttggctgccatttttggggtgaggccgttcgcggccgaggggcgcagcccctggggggatgggaggcccgcgttagcgggccgggagggttcgagaagggggggcaccccccttcggcgtgcgcggtcacgcgcacagggcgcagccctggttaaaaacaaggtttataaatattggtttaaaagcaggttaaaagacaggttagcggtggccgaaaaacgggcggaaacccttgcaaatgctggattttctgcctgtggacagcccctcaaatgtcaataggtgcgcccctcatctgtcagcactctgcccctcaagtgtcaaggatcgcgcccctcatctgtcagtagtcgcgcccctcaagtgtcaataccgcagggcacttatccccaggcttgtccacatcatctgtgggaaactcgcgtaaaatcaggcgttttcgccgatttgcgaggctggccagctccacgtcgccggccgaaatcgagcctgcccctcatctgtcaacgccgcgccgggtgagtcggcccctcaagtgtcaacgtccgcccctcatctgtcagtgagggccaagttttccgcgaggtatccacaacgccggcggccgcggtgtctcgcacacggcttcgacggcgtttctggcgcgtttgcagggccatagacggccgccagcccagcggcgagggcaaccagcccggtgagcgtcggaaagggtcgacggatcttttccgctgcataaccctgcttcggggtcattatagcgattttttcggtatatccatcctttttcgcacgatatacaggattttgccaaagggttcgtgtagactttccttggtgtatccaacggcgtcagccgggcaggataggtgaagtaggcccacccgcgagcgggtgttccttcttcactgtcccttattcgcacctggcggtgctcaacgggaatcctgctctgcgaggctggccggctaccgccggcgtaacagatgagggcaagcggatggctgatgaaaccaagccaaccaggaagggcagcccacctatcaaggtgtactgccttccagacgaacgaagagcgattgaggaaaaggcggcggcggccggcatgagcctgtcggcctacctgctggccgtcggccagggctacaaaatcacgggcgtcgtggactatgagcacgtccgcgagctggcccgcatcaatggcgacctgggccgcctgggcggcctgctgaaactctggctcaccgacgacccgcgcacggcgcggttcggtgatgccacgatcctcgccctgctggcgaagatcgaagagaagcaggacgagcttggcaaggtcatgatgggcgtggtccgcccgagggcagagccatgacttttttagccgctaaaacggccggggggtgcgcgtgattgccaagcacgtccccatgcgctccatcaagaagagcgacttcgcggagctggtattcgtgcagggcaagattcggaataccaagtacgagaaggacggccagacggtctacgggaccgacttcattgccgataaggtggattatctggacaccaaggcaccaggcgggtcaaatcaggaataagggcacattgccccggcgtgagtcggggcaatcccgcaaggagggtgaatgaatcggacgtttgaccggaaggcatacaggcaagaactgatcgacgcggggttttccgccgaggatgccgaaaccatcgcaagccgcaccgtcatgcgtgcgccccgcgaaaccttccagtccgtcggctcgatggtccagcaagctacggccaagatcgagcgcgacagcgtgcaactggctccccctgccctgcccgcgccatcggccgccgtggagcgttcgcgtcgtctcgaacaggaggcggcaggtttggcgaagtcgatgaccatcgacacgcgaggaactatgacgaccaagaagcgaaaaaccgccggcgaggacctggcaaaacaggtcagcgaggccaagcaggccgcgttgctgaaacacacgaagcagcagatcaaggaaatgcagctttccttgttcgatattgcgccgtggccggacacgatgcgagcgatgccaaacgacacggcccgctctgccctgttcaccacgcgcaacaagaaaatcccgcgcgaggcgctgcaaaacaaggtcattttccacgtcaacaaggacgtgaagatcacctacaccggcgtcgagctgcgggccgacgatgacgaactggtgtggcagcaggtgttggagtacgcgaagcgcacccctatcggcgagccgatcaccttcacgttctacgagctttgccaggacctgggctggtcgatcaatggccggtattacacgaaggccgaggaatgcctgtcgcgcctacaggcgacggcgatgggcttcacgtccgaccgcgttgggcacctggaatcggtgtcgctgctgcaccgcttccgcgtcctggaccgtggcaagaaaacgtcccgttgccaggtcctgatcgacgaggaaatcgtcgtgctgtttgctggcgaccactacacgaaattcatatgggagaagtaccgcaagctgtcgccgacggcccgacggatgttcgactatttcagctcgcaccgggagccgtacccgctcaagctggaaaccttccgcctcatgtgcggatcggattccacccgcgtgaagaagtggcgcgagcaggtcggcgaagcctgcgaagagttgcgaggcagcggcctggtggaacacgcctgggtcaatgatgacctggtgcattgcaaacgctagggccttgtggggtcagttccggctgggggttcagcagccagcgctttactggcatttcaggaacaagcgggcactgctcgacgcacttgcttcgctcagtatcgctcgggacgcacggcgcgctctacgaactgccgataaacagaggattaaaattgacaattgtgattaaggctcagattcgacggcttggagcggccgacgtgcaggatttccgcgagatccgattgtcggccctgaagaaagctccagagatgttcgggtccgtttacgagcacgaggagaaaaagcccatggaggcgttcgctgaacggttgcgagatgccgtggcattcggcgcctacatcgacggcgagatcattgggctgtcggtcttcaaacaggaggacggccccaaggacgctcacaaggcgcatctgtccggcgttttcgtggagcccgaacagcgaggccgaggggtcgccggtatgctgctgcgggcgttgccggcgggtttattgctcgtgatgatcgtccgacagattccaacgggaatctggtggatgcgcatcttcatcctcggcgcacttaatatttcgctattctggagcttgttgtttatttcggtctaccgcctgccgggcggggtcgcggcgacggtaggcgctgtgcagccgctgatggtcgtgttcatctctgccgctctgctaggtagcccgatacgattgatggcggtcctgggggctatttgcggaactgcgggcgtggcgctgttggtgttgacaccaaacgcagcgctagatcctgtcggcgtcgcagcgggcctggcgggggcggtttccatggcgttcggaaccgtgctgacccgcaagtggcaacctcccgtgcctctgctcacctttaccgcctggcaactggcggccggaggacttctgctcgttccagtagctttagtgtttgatccgccaatcccgatgcctacaggaaccaatgttctcggcctggcgtggctcggcctgatcggagcgggtttaacctacttcctttggttccgggggatctcgcgactcgaacctacagttgtttccttactgggctttctcagcccccgagcgcttagtgggaatttgtaccccttatcgaaccgggagcacaggatgacgcctaacaattcattcaagccgacaccgcttcgcggcgcggcttaattcaggagttaaacatcatgagggaagcggtgatcgccgaagtatcgactcaactatcagaggtagttggcgtcatcgagcgccatctcgaaccgacgttgctggccgtacatttgtacggctccgcagtggatggcggcctgaagccacacagtgatattgatttgctggttacggtgaccgtaaggcttgatgaaacaacgcggcgagctttgatcaacgaccttttggaaacttcggcttcccctggagagagcgagattctccgcgctgtagaagtcaccattgttgtgcacgacgacatcattccgtggcgttatccagctaagcgcgaactgcaatttggagaatggcagcgcaatgacattcttgcaggtatcttcgagccagccacgatcgacattgatctggctatcttgctgacaaaagcaagagaacatagcgttgccttggtaggtccagcggcggaggaactctttgatccggttcctgaacaggatctatttgaggcgctaaatgaaaccttaacgctatggaactcgccgcccgactgggctggcgatgagcgaaatgtagtgcttacgttgtcccgcatttggtacagcgcagtaaccggcaaaatcgcgccgaaggatgtcgctgccgactgggcaatggagcgcctgccggcccagtatcagcccgtcatacttgaagctaggcaggcttatcttggacaagaagatcgcttggcctcgcgcgcagatcagttggaagaatttgttcactacgtgaaaggcgagatcaccaaggtagtcggcaaataatgtctaacaattcgttcaagccgacgccgcttcgcggcgcggcttaactcaagcgttagagagctggggaagactatgcgcgatctgttgaaggtggttctaagcctcgtcttgcgatggcatttcgatccattcccattccgcgctcaagatggcttcccctcggcagttcatcagggctaaatcaatctagccgacttgtccggtgaaatgggctgcactccaacagaaacaatcaaacaaacatacacagcgacttattcacacgagctca

SEQ ID NO: 64 - DNA, 23255 bp, Artificial sequence
  plasmid pDAB108225
aattacaacggtatatatcctgccagtcagcatcatcacaccaaaagttaggcccgaatagtttgaaattagaaagctcgcaattgaggtctacaggccaaattcgctcttagccgtacaatattactcaccggatcctaaccggtttaattaaggcgcgccatgcccgggcaagcggccgcacaagtttgtacaaaaaagcaggcttctagacctaggactaggcactgagtgactcactgacctgactgagtgactggcggccgcatcagtaagtgcatataaagaaagtaataagtagatgagtttggtaattacatgagatcgacagaggaattacgacgttcttgccatcaaaaagagattccaaatttgtaaagagccatatgtttgttgggcaattgagattgagtcttgccaatccttctttggaagttgacaatttaaaaattcgaagccagatttactcctaattaattattgagcttgaagtcttaattaccgattacatctctgagcagtagtagtcgatgatctttcccggtcactaattttactcaagcgaatcgatttttactttagtttagctaaccgtacgccattacagtttagagagcagcaagggtaagaacattattaaaacataaagtaaacctctcatttattacggtgtagtgctaattacattagcctcaaacatcctaagcttacagttttataaaacacacacgatgactgtgtatagtattaacatacatcaatagcaacactcatgatcatcgtgctaggccgggcttggactgggtgacctaagtgattaagctaactactcaaagcgcattcgttggctcatagacaaaggcagcatcttcagtctcaagatcaatcctcggatcatttctcagagcattaagacgcctcaggtaacatgcaccacgcaaaatctgaaggttgatctggacaacacatgggtactcattagagacagcaggatcaagatatgttcctttgatgaagtcattgaaggctccaatggctggaccacaccagacttgatagtccatgacacgatcaggagcacccatgttggcccaacgtgatgcaagaccaagataccatctgaaacacaaagacatcttgagtttggggtcatgttccgctctctgtatcttctctggattcttcaaaccattgatgtaaaagtccttggtctcttcccagacctcttgaagtgccctcttgaagatcctcttctcgatcctttcaagttcagcaggaggcattgaatcgaaagagtcgtacttgcaaaagagttcgtacaatttgttagctcttgatgggaacattgttcccttcttgagaacttggagtttcacaccttcctcaaacatatcagctgctggagccatgcaaatgtcactgtaggtggcttgactgagttgttttctcacgttgtcacatgtcccggactgtttagcaacttgattgacagtcccagtcactatgaaggcagctcccattgtgagggcagccgcagcagcttgtgggcagccaacaccgcctccagctccaactctgactctaaggtgcgcaggataaccacactctctgtgcagtctgttcctaaggttgatgatcaaaggcaagatgacgtggatgggacggttgtcagtgtgaccaccagaatcagcttcaacagcgatgtcgtctgcgacaggaacacgacgggcaagttcggcttgttcttgtgttatctcaccagaagctatgagtttctcaaggaggtgttccggagccggtctgatgaacatttcggcgagttctgttctggacacttttccaatgatacggtttctgatgttgacactcccatcagcgttccttgagagtccggctgcacggtaacgaacaacttggggagtgagggtcatgaatgcagaagcctccaccacagtaacgcccttttcgaggaagagatcaacattccccttttccaagttgctgtcaaaaggtgaatgaatgaggttcacagcatatggtccttgaggcagagccgcttgtatcttctccaaagctgccctcacatggtgcattggaagcccacccgctccaaaagaacccaatatcttcctcttcccagcagcaatgacaaggtccgcagacgcaattcccttggccattgctccagtgtacagaggtgctgacacattgtacgtttccatgaaggacttgtcaccaagatcacttatggagcatggtttgatactgacaatccttgaagaagttgcaggtttggattcaaactgcaccaaattggagttttcaacaccaagatacaatggattgtccacttcaagcaggacatctctcaactgagtcggactgagtgcaactccagttttcccagggtccgcttttgcgctgggtggctgttgttgaacatccggaatggcttgaggttttgcactgacaacacgaactctgagttctttggcttcatacacacggagaccatcaacccaaagtgctccatctgccactatgtcaacgtagcctccattttcaggagaggctgtgattgaaactatgtgcacctcacagtccatcgcacggttctttggtgtcaattgaccacggtacttccacgccgtttttccaggggcatgggcaaaggtcggattgctcacattgtattctcccggtatgttctggtccaccgcaaatgcctcaatgagctggaacattgactcaattcccaaagatccaggcatcacaggatcaaaccaaaagtgacaagagaagaaccagtcttgtgggttaacatctttgtgtccatgcgcatatcctttcccatgcagcccagaatcaggagcaatgttgaggtaatccaaatactcacactgttctgaccttctgagaacttgagcattagttgcatctggaagtttctcagtcagctgttctttgcctttggctgatgcgatttcaactcttctcacactcgtgttgttagttttgcaccaaggctccgtctttttcccattgtcaagtccagcttgctgagcaaacacctctggagtgaaccatccaaaggaagtgcttcctttgtagaaaaccacgccatcaacagacaactcaaacgtgaatctgtgaatccccatctttcccaacattgcatatccagtgcacttggtcacattccttatggttttccccctcacatccacatctggcctcaccatttcagcacttgcatcaaggttcctaaagagaatgtcatctttgtccatcgtcagtggtgctttcaacacactggtgagaacaccggatgtctgaagtccgatttccatgatgatggaataaggcatgtgcccatcattgcaagaaccatcaaagaaccacgcatcttgaggacagtcaaactcccccaccattgtgcctttgctgggattgcaatcaacattcaggaacttgccatgttccatgtttgtgacttcaacaactctagtcacaagagccaaatcaaaagcagggcttctgctcgtatttgacttatcaaatcttgcgaactctggtcccaagcagttgctaacttttccacacatgaactctgacatgttgtaccagttcagaggcatttctccagctttgcaattgttgtcaagtgggttgccagggaaagggatgaagcaaattgccctcggagggtaagaactaggggagaagaacggcgtcgggttgccaggaagttttgacatgggatgccaggacatttctttcggagcgagagcgtcacccttgaggatatgttcaggaagtgcaactggctttggcgcaagaacatctgctgagaaagcaggcttcgcaggggcagcagaagcactagcactggcaccagagctggccttggacgcttccggtcccacagtggctgcaccgttagcaaaaacgggctgaactttggaggggttcttgttcgtggatctcttctgcatcttgagagcaatgcccttgaagtccacgacgatctttttgttaagatccccctttccgtagtcgctgattctatcaaggctgaaatcttgacccttttcgaaatcaacgtcaatgatgttgacgtcagcaatggcgtacggatcgttatcctcgtcgaatcccatctctttgatctccatgacgtagaccaactttcccttatgaggagatatctgacccctacacctaactttgttcgggtgtccgttgacgggtctgaagtcaaatggtccggtggtaaggtgcaaaccgagccagatcatgtacatcttgagcatttgtgaacaaccgtcgctgacaagagatccagccatgacttgatccttaacaaaatggcatgggaagtaccaatggtccctctccaagattttctcaccaaccaactgacccaaaccgtacacacctcccttatggtcaatgctggtgactctatcaatcatgagcatcttacgtgcgcagagtttgtagttgatctccggcatgccattctttgagccaaaaacggaagcccaatctttgtcaaccaaggtctgcatctccttttcgttgagttttgttttgtgaaggcagggagcgacagcatagggagaaacatcttgctttggaatcttagctctggcagccaaatcccctcttgtgaacaccacaccctttcccgcatcaagctcctcatttgtgaagaagccagcacagccatctctcatctcaatgagaagcctcccattgacatagcagtcatactcaaagaagaacatggagatgccaccatccaaacgtttggcaaaaccggtcactctgatgtcatactcaagggtctctccctcatgggcaaccccatagaatgtcaacgtggtgttgagcagacggtaaactctgtcaccttggttctggaaatcaattcccatgtatgatatcagcatcaaatcgcactgtccactctcaaccagaactgcccagggacaatcacctccctcagacaattcgccattcactggaagatcatactcagtgaccattctggcaccaactctgtagttgttgacctcggcatccatgagtgtgacccttgtcacaagcaggtattcacgagcaggcagcctcacccttctggggtacttgtctatgacagcaaactccggaccaaaaaccttagctatgtcaccctctgcaaactccaggagttcctcatagttgaacacctcagttttgccagaggtcagttcctccttggtcatctcccaacatggcttcttgttggtcttgacacgaagcgccatttttggttgtggatccgttttgctatttgtgtatgttttcttgttttggtttgagtttaaccatcattctcttctctctatttatagagagaagaggttggcacgcagcactgcgacatgagagaaagacacgggtgaagaggcgggagctgaggtggcagcatgcatgcatgcatggccagtcgtgtcatagtgagaagaggagaaagctgaggtggcaacgtgtatggccagtggtgtcatagtgtgaaagctgacgtggcagcatgcatggtgagtgtgaaaaaggcgccacagtgcagatgttactgaacaaaagcggtgtgccatgcaacttttgcccatcgtcgtctttctcatccaagttcctctttataatatcttttaccaaatcatattttaatataaattcattttatttttaaataaagtaatattatatccataaatattaactctcatttaacacattttcaaatttaacacttctgtaaataaatttattaacaaaaacttgtaaatatgttcaaataaatccataaatattaactttcattttattaacaaaaaaatctttactataagctgcggccgcttaattaagatgagtgatactcaggactcaggactcactctgctgatcactagtgctagcctcgaggtcgacacaactttgtatacaaaagttgtctaggatctgcttttacatgcgagacacatcttctaaagtaattttaataatagttactatattcaagatttcatatatcaaatactcaatattacttctaaaaaattaattagatataattaaaatattacttttttaattttaagtttaattgttgaatttgtgactattgatttattattctactatgtttaaattgttttatagatagtttaaagtaaatataagtaatgtagtagagtgttagagtgttaccctaaaccataaactataagatttatggtggactaattttcatatatttcttattgcttttaccttttcttggtatgtaagtccgtaactggaattactgtgggttgccatgacactctgtggtcttttggttcatgcatggatcttgcgcaagaaaaagacaaagaacaaagaaaaaagacaaaacagagagacaaaacgcaatcacacaaccaactcaaattagtcactggctgatcaagatcgccgcgtccatgtatgtctaaatgccatgcaaagcaacacgtgcttaacatgcactttaaatggctcacccatctcaacccacacacaaacacattgcctttttcttcatcatcaccacaaccacctgtatatattcattctcttccgccacctcaatttcttcacttcaacacacgtcaacctgcatatgcgtgtcatcccatgcccaaatctccatgcatgttccaaccaccttctctcttatataatacctataaatacctctaatatcactcacttctttcatcatccatccatccagagtactactactctactactataataccccaacccaactcatattcaatactactctaggatccacaaccaaaaatggctgcaaggaacgtgagtgcggctcatgagatgcatgacgagaagaggatagctgttgtgggcatggctgttcagtatgctggatgcaaaacgaaagacgagttctgggaagttctcatgaatggaaaagttgagagcaaagtgatcagcgacaaacgtcttggttcaaattaccgtgctgaacactacaaagctgaaaggagcaagtatgctgacaccttctgcaatgagacatatggaactcttgatgagaacgaaatagacaatgagcatgaactccttttgaaccttgccaaacaagccttggctgaaacatctgtcaaagattcaacaagatgtggcatagtttctggatgcctcagcttcccgatggacaacctccaaggtgaactcttgaatgtgtaccagaaccatgttgagaagaaacttggtgccagagttttcaaagatgcctctcactggtcagaaagagaacagtccaacaaaccagaggctggtgacagaagaatcttcatggaccctgcttcctttgttgctgaggaactcaatcttggcgctctccactactctgttgatgctgcctgtgccactgcgctctatgtgctcagactggcgcaagatcacttggtctctggtgcagctgatgtgatgctttgtggtgcaacatgcctgccggagccgtttttcatactctctgggttctcaaccttccaagccatgcctgttggaacgggtcagaatgtgtccatgccgctgcacaaagattctcaaggattgacccctggtgaaggaggttccatcatggtcctcaaacgtttggatgacgcaatcagagatggagatcacatctatggaacacttttgggagccaatgtcagcaacagtggcactggtctgccacttaaaccccttttgccgtcagagaaaaagtgcctcatggacacctacacacgtatcaatgtgcatccccacaagattcagtatgttgaatgccatgcaactgggactccacaaggtgatcgtgtggaaattgatgctgtgaaggcttgctttgaaggcaaagtcccacgttttggaaccacaaaagggaactttggacacacattggtggcagctgggtttgctggcatgtgcaaagtgcttctctccatgaagcacgggatcattccacccactccgggaatagatgacgaaacgaagatggaccctctggttgtctctggtgaggccattccctggccagaaacgaatggagaaccgaagcgtgctggtctctcagcgtttggatttggtgggaccaatgctcatgctgtctttgaggaacatgacccaagcaatgctgcatgcactggccatgactccatttctgctctctctgcacgttgtggtggtgagtcaaacatgagaatagcaatcactgggatggatgccacttttggtgctttgaaaggattggatgcttttgaaagggccatctacactggtgctcatggtgctataccactcccagaaaagagatggagattcctggggaaagacaaggacttccttgatctttgtggagtcaaagcaacaccgcatggctgttacattgaagatgttgaagttgatttccagaggctgaggactccaatgactcctgaagatatgctcttgcctcaacagcttctggctgtcaccacaattgatagggccatattggactctggcatgaagaaaggtggaaatgtggctgtctttgtggggttggggaccgatcttgaactctaccgtcaccgtgcaagggttgctctcaaggagagagtgaggcctgaagccagcaagaaactcaatgacatgatgcagtacatcaatgattgtgggacaagcacttcttacaccagctacataggcaacttggttgcaacaagggtcagttcacaatggggcttcacgggaccttccttcacaatcacagaaggcaacaattctgtgtacagatgtgctgaacttggcaaatacctcttggaaacgggagaggttgatggggttgtggttgcgggtgttgatctctgtgggagtgctgagaacctttacgtcaagtcaaggcgtttcaaggtgtctacatctgacaccccgagagccagctttgatgcagctgctgatggttactttgttggagagggctgtggtgcatttgtgctcaagcgtgagacaagctgcaccaaggatgacagaatctatgcttgcatggatgccatagttcctggaaatgttccatctgcatgtttgagagaggcattggatcaagccagagtcaagcctggagacatcgagatgttggagctttctgctgattcagcgaggcatttgaaggacccgtctgttctcccaaaggaactcactgctgaggaagagattggcggacttcagacgattcttcgtgacgatgacaagctcccaaggaatgttgcaactggaagtgtcaaggccactgttggtgacactggttatgcttctggtgctgccagtttgattaaggctgcgctttgcatctacaaccgttacctgcccagcaatggagatgactgggatgaacctgcacctgaagcaccctgggacagcacactctttgcgtgccagacctcaagagcttggttgaagaaccctggtgagagacgttatgcggctgtttccggagtcagtgaaaccagaagttgctacagtgtgctgctttctgaagcagagggacactacgagagagagaacagaatcagtttggatgaggaagcacccaagctcattgtgttgagagcagactcccatgaagagattcttggaagattggacaagataagggaaaggttcttgcagcccacgggtgctgcacccagagagtctgaattgaaggcgcaagcccgtaggatctttcttgaactccttggtgagacccttgcccaagatgcagcttcatctggaagtcagaagccccttgctctcagcttggtctccactccatccaagctccagagagaggtggaacttgcggcaaaaggcattccgagatgtctcaagatgagacgtgattggagttcccctgctggaagcagatatgcgcctgagcctttggccagtgacagagttgccttcatgtatggagaaggaaggagcccttactatggcatcacacaagacattcataggatttggcctgaacttcatgaggtcatcaatgagaaaacaaaccgtctctgggctgaaggtgacagatgggtcatgccaagggccagcttcaagagtgagcttgagtcacaacagcaagagtttgacagaaacatgattgaaatgttccgtcttggaatcctcacctcaattgccttcacaaacctggcgagagatgttctcaacatcacgcccaaagcagcctttggactcagtttgggagagatttccatgatctttgctttctccaagaaaaacggtttgataagcgatcagttgacaaaggatttgagagagtcagatgtctggaacaaagctctggctgttgagttcaatgcgctcagagaagcctggggcattccacagtctgtcccaaaagatgagttctggcaaggttacatagtgaggggaacgaaacaagacatagaagcagccatagcaccagactcaaagtatgtgaggttgaccatcatcaatgatgccaacactgctctcatcagtggaaagcctgatgcatgcaaagctgcgattgctcgtcttggtggcaacatccctgcgcttccagtcactcaaggcatgtgtgggcattgcccagaggtgggaccttacaccaaggacatcgcaaagatccacgccaaccttgagttccctgtggttgatggtcttgatctctggactaccataaaccagaagaggcttgtgccaagagccacgggtgccaaagatgaatgggctccttcatcctttggggagtatgctggacagctctatgagaaacaagccaacttccctcagatagttgaaaccatctacaagcagaactatgatgtgtttgttgaagttgggccaaacaatcacagaagcacagcagtgagaaccacgcttggaccacagagaaaccaccttgctggtgccatagacaagcagaacgaggatgcttggacgacaatagtcaagctcgtggcttcattgaaggctcaccttgttcctggagtgaccatcagtccgctctaccactccaagctcgttgcagaggctgaggcttgttatgctgcgctctgtaaaggtgagaaacccaagaaaaacaagtttgtgagaaagattcagttgaatggcagattcaacagcaaggcagaccccatctcctcagcagaccttgcatccttcccacctgcggaccctgcgattgaagctgccatctcttcaaggatcatgaagcctgtggctccgaaattctatgcgcgtctcaacattgatgagcaagatgagaccagagatccgatcttgaacaaggacaatgcgccttccagctccagctcttccagcagttcctcttccagcagttcatctccgtctcctgctccttcagctccagttcagaagaaagctgccccagctgcggagacaaaagctgttgccagtgctgatgcacttcgtagtgccctgcttgatcttgactccatgcttgcgctcagctctgcaagtgcttctggcaaccttgttgagactgcgccatctgatgccagtgtcattgtccctccgtgcaacattgctgatcttggcagcagagctttcatgaaaacttatggtgtttctgcgcctctgtacaccggtgcaatggccaagggaattgcctctgcggacttggtgatcgcagctggaaggcaaggaatccttgcgtcatttggtgctggaggccttccaatgcaagttgtgcgtgagtccattgaaaagattcaagctgccctgcccaatggaccatatgctgtcaacctcatccattctccttttgacagcaaccttgagaagggaaatgttgatctcttcttggaaaagggtgtcacttttgttgaggcttcagccttcatgacgttgacaccgcaagttgtcagatacagagcggctgggttgacgaggaatgcagatgggtcagtcaacataaggaacagaatcattgggaaagtctccagaactgagctggctgaaatgttcatgcgtcctgcacctgagcatcttttgcagaagctcattgcttctggggagatcaatcaagaacaagctgagttggccagacgtgttcctgtggctgatgacattgcggttgaagctgattctggtggacacactgacaaccgtccaatccatgtcattctgcctctgattatcaacctgagggataggcttcacagagagtgtggatacccagcaaacctgagggttcgtgttggtgctgggggtggcattgggtgtccccaagctgcgctggcaactttcaacatgggtgcctctttcattgtcactggaacagtgaaccaagttgccaaacaatctgggacgtgtgacaatgtgaggaaacagcttgcgaaagcaacttactcagatgtttgcatggcaccggcagctgacatgtttgaggaaggtgtgaaacttcaagttttgaagaaaggaacaatgttcccttcaagagccaacaaactctatgagttgttctgcaagtatgattcttttgagtccatgcctccagcagagcttgcgagggttgagaaaagaatcttcagtcgtgcattggaagaggtctgggatgagaccaagaacttctacatcaaccgtctccacaacccagagaagatacagagggctgagagggaccccaaactgaagatgtcactgtgtttcagatggtatctgtccctggcttcaaggtgggccaacactggagcttctgacagagtcatggactaccaagtttggtgtggtcctgccattggttcattcaatgatttcatcaaaggaacttaccttgatccggcagtggcaaatgagtacccgtgtgttgtgcagatcaacaaacagattcttagaggagcgtgcttcttgaggcgtcttgaaatactgagaaatgcaaggctttcagatggtgcagctgcacttgtggcgagcattgatgacacatatgtccctgctgagaagctgtgagtagttagcttaatcacttaggtcacctcgagtatcaaaatctatttagaaatacacaatattttgttgcaggcttgctggagaatcgatctgctatcataaaaattacaaaaaaattttatttgcctcaattattttaggattggtattaaggacgcttaaattatttgtcgggtcactacgcatcattgtgattgagaagatcagcgatacgaaatattcgtagtactatcgataatttatttgaaaattcataagaaaagcaaacgttacatgaattgatgaaacaatacaaagacagataaagccacgcacatttaggatattggccgagattactgaatattgagtaagatcacggaatttctgacaggagcatgtcttcaattcagcccaaatggcagttgaaatactcaaaccgccccatatgcaggagcggatcattcattgtttgtttggttgcctttgccaacatgggagtccaaggttggcgcgccgaattcgcggccgcttaattaactactgtcactgaggccgtagacgagtacggactgatctaactagtgctagcctcgaggtcgacacccagctttcttgtacaaagtggttgcggccgcttaattaaatttaaattcaattaatgcaatcttgattttcaacaacgaaggtaatggcgtaaaagaaaaaatgtatgttattgtattgatctttcatgatgttgaagcgtgccataatatgatgatgtataattaaaatattaactgtcgcattttattgaaatggcactgttatttcaaccatatctttgattctgttacatgacacgactgcaagaagtaaataatagacgccgttgttaaagaattgctatcatatgtgcctaactagagggaatttgagcgtcagacctaatcaaatattacaaaatatctcactctgtcgccagcaatggtgtaatcagcgcagacaaatggcgtaaagatcgcggaaaaacctccccgagtggcatgatagctgcctctgtattgctgatttagtcagccttatttgacttaagggtgccctcgttagtgacaaattgctttcaaggagacagccatgccccacactttgttgaaaaacaaattgcctttggggagacggtaaagccagttgctcttcaataaggaatgtcgaggaggcaatgtaaccgcctctggtagtacacttctctaatccaaaaatcaatttgtattcaagataccgcaaaaaacttatggtttaaaccctgcaggactagtccagaaggtaattatccaagatgtagcatcaagaatccaatgtttacgggaaaaactatggaagtattatgtaagctcagcaagaagcagatcaatatgcggcacatatgcaacctatgttcaaaaatgaagaatgtacagatacaagatcctatactgccagaatacgaagaagaatacgtagaaattgaaaaagaagaaccaggcgaagaaaagaatcttgaagacgtaagcactgacgacaacaatgaaaagaagaagataaggtcggtgattgtgaaagagacatagaggacacatgtaaggtggaaaatgtaagggcggaaagtaaccttatcacaaaggaatcttatcccccactacttatccttttatatttttccgtgtcatttttgcccttgagttttcctatataaggaaccaagttcggcatttgtgaaaacaagaaaaaatttggtgtaagctattttctttgaagtactgaggatacaacttcagagaaatttgtaagtttgtaggtaccagatctggatcccaaaccatgtctccggagaggagaccagttgagattaggccagctacagcagctgatatggccgcggtttgtgatatcgttaaccattacattgagacgtctacagtgaactttaggacagagccacaaacaccacaagagtggattgatgatctagagaggttgcaagatagatacccttggttggttgctgaggttgagggtgttgtggctggtattgcttacgctgggccctggaaggctaggaacgcttacgattggacagttgagagtactgtttacgtgtcacataggcatcaaaggttgggcctaggatctacattgtacacacatttgcttaagtctatggaggcgcaaggttttaagtctgtggttgctgttataggccttccaaacgatccatctgttaggttgcatgaggctttgggatacacagcccggggtacattgcgcgcagctggatacaagcatggtggatggcatgatgttggtttttggcaaagggattttgagttgccagctcctccaaggccagttaggccagttacccaaatctgagtagttagcttaatcacctagagctcgatcggcggcaatagcttcttagcgccatcccgggttgatcctatctgtgttgaaatagttgcggtgggcaaggctctctttcagaaagacaggcggccaaaggaacccaaggtgaggtgggctatggctctcagttccttgtggaagcgcttggtctaaggtgcagaggtgttagcgggatgaagcaaaagtgtccgattgtaacaagatatgttgatcctacgtaaggatattaaagtatgtattcatcactaatataatcagtgtattccaatatgtactacgatttccaatgtctttattgtcgccgtatgtaatcggcgtcacaaaataatccccggtgactttcttttaatccaggatgaaataatatgttattataatttttgcgatttggtccgttataggaattgaagtgtgcttgaggtcggtcgccaccactcccatttcataattttacatgtatttgaaaaataaaaatttatggtattcaatttaaacacgtatacttgtaaagaatgatatcttgaaagaaatatagtttaaatatttattgataaaataacaagtcaggtattatagtccaagcaaaaacataaatttattgatgcaagtttaaattcagaaatatttcaataactgattatatcagctggtacattgccgtagatgaaagactgagtgcgatattatggtgtaatacataggaattcgtttaaacgatctgcgtctaattttcggtccaacttgcacaggaaagacgtcgaccgcggtagctcttgcccagcagactgggcttccagtcctttcgctcgatcgggtccaatgttgtcctcagctgtgaaccggaagcggacgaccaacagtggaagaactgaaaggaacgagccgtctataccttgatgatcggcctctggtgaagggtatcatcgcagccaagcaagctcatgaaaggctgatgggggaggtgtataattatgaggcccacggcgggcttattctttagggaggatctatctcgttgctcaagtgcatggcgcaaagcagttattggagtgcggattttcgttggcatattattcgccacgagttagcagacgaagagaccttcatgaacgtggccaaggccagagttaagcagatgttacgccctgctgcaggcctttctattatccaatagttggttgatctttggaaagagcctcggctgaggcccatactgaaagagatcgatggatatcgatatgccatgttgtttgctagccagaaccagatcacatccgatatgctattgcagcttgacgcagatatggaggataagttgattcatgggatcgctcaggagtagctcatccatgcacgccgacaagaacagaaattccgtcgagttaacgcagccgcttacgacggattcgaaggtcatccattcggaatgtattagtttgcaccagctccgcgtcacacctgtcttcatttgaataagatgttagcaattgtttttagctttgtcttgttgtggcagggcggcaagtgcttcagacatcattctgttttcaaattttatgctggagaacagcttcttaattcctttggaaataatagactgcgtcttaaaattcagatgtctggatatagatatgattgtaaaataacctatttaagtgtcatttagaacataagttttatgaatgttcttccattttcgtcatcgaacgaataagagtaaatacaccttttttaacattacaaataagttcttatacgttgtttatacaccgggaatcatttccattattttcgcgcaaaagtcacggatattcgtgaaagcgacataaactgcgaaatttgcggggagtgtcttgagtttgcctcgaggctagcgcatgcacatagacacacacatcatctcattgatgcttggtaataattgtcattagattgtttttatgcatagatgcactcgaaatcagccaattttagacaagtatcaaacggatgtgacttcagtacattaaaaacgtccgcaatgtgttattaagttgtctaagcgtcaatttgatttacaattgaatatatcctgccccagccagccaacagctcgatttacaattgaatatatcctgccggccggcccacgcgtgtcgaggaattctgatctggcccccatttggacgtgaatgtagacacgtcgaaataaagatttccgaattagaataatttgtttattgctttcgcctataaatacgacggatcgtaatttgtcgttttatcaaaatgtactttcattttataataacgctgcggacatctacatttttgaattgaaaaaaaattggtaattactctttctttttctccatattgaccatcatactcattgctgatccatgtagatttcccggacatgaagccatttacaattgaatatatcctgccgccgctgccgctttgcacccggtggagcttgcatgttggtttctacgcagaactgagccggttaggcagataatttccattgagaactgagccatgtgcaccttccccccaacacggtgagcgacggggcaacggagtgatccacatgggacttttaaacatcatccgtcggatggcgttgcgagagaagcagtcgatccgtgagatcagccgacgcaccgggcaggcgcgcaacacgatcgcaaagtatttgaacgcaggtacaatcgagccgacgttcacgcggaacgaccaagcaagcttggctgccatttttggggtgaggccgttcgcggccgaggggcgcagcccctggggggatgggaggcccgcgttagcgggccgggagggttcgagaagggggggcaccccccttcggcgtgcgcggtcacgcgcacagggcgcagccctggttaaaaacaaggtttataaatattggtttaaaagcaggttaaaagacaggttagcggtggccgaaaaacgggcggaaacccttgcaaatgctggattttctgcctgtggacagcccctcaaatgtcaataggtgcgcccctcatctgtcagcactctgcccctcaagtgtcaaggatcgcgcccctcatctgtcagtagtcgcgcccctcaagtgtcaataccgcagggcacttatccccaggcttgtccacatcatctgtgggaaactcgcgtaaaatcaggcgttttcgccgatttgcgaggctggccagctccacgtcgccggccgaaatcgagcctgcccctcatctgtcaacgccgcgccgggtgagtcggcccctcaagtgtcaacgtccgcccctcatctgtcagtgagggccaagttttccgcgaggtatccacaacgccggcggccgcggtgtctcgcacacggcttcgacggcgtttctggcgcgtttgcagggccatagacggccgccagcccagcggcgagggcaaccagcccggtgagcgtcggaaagggtcgacggatcttttccgctgcataaccctgcttcggggtcattatagcgattttttcggtatatccatcctttttcgcacgatatacaggattttgccaaagggttcgtgtagactttccttggtgtatccaacggcgtcagccgggcaggataggtgaagtaggcccacccgcgagcgggtgttccttcttcactgtcccttattcgcacctggcggtgctcaacgggaatcctgctctgcgaggctggccggctaccgccggcgtaacagatgagggcaagcggatggctgatgaaaccaagccaaccaggaagggcagcccacctatcaaggtgtactgccttccagacgaacgaagagcgattgaggaaaaggcggcggcggccggcatgagcctgtcggcctacctgctggccgtcggccagggctacaaaatcacgggcgtcgtggactatgagcacgtccgcgagctggcccgcatcaatggcgacctgggccgcctgggcggcctgctgaaactctggctcaccgacgacccgcgcacggcgcggttcggtgatgccacgatcctcgccctgctggcgaagatcgaagagaagcaggacgagcttggcaaggtcatgatgggcgtggtccgcccgagggcagagccatgacttttttagccgctaaaacggccggggggtgcgcgtgattgccaagcacgtccccatgcgctccatcaagaagagcgacttcgcggagctggtattcgtgcagggcaagattcggaataccaagtacgagaaggacggccagacggtctacgggaccgacttcattgccgataaggtggattatctggacaccaaggcaccaggcgggtcaaatcaggaataagggcacattgccccggcgtgagtcggggcaatcccgcaaggagggtgaatgaatcggacgtttgaccggaaggcatacaggcaagaactgatcgacgcggggttttccgccgaggatgccgaaaccatcgcaagccgcaccgtcatgcgtgcgccccgcgaaaccttccagtccgtcggctcgatggtccagcaagctacggccaagatcgagcgcgacagcgtgcaactggctccccctgccctgcccgcgccatcggccgccgtggagcgttcgcgtcgtctcgaacaggaggcggcaggtttggcgaagtcgatgaccatcgacacgcgaggaactatgacgaccaagaagcgaaaaaccgccggcgaggacctggcaaaacaggtcagcgaggccaagcaggccgcgttgctgaaacacacgaagcagcagatcaaggaaatgcagctttccttgttcgatattgcgccgtggccggacacgatgcgagcgatgccaaacgacacggcccgctctgccctgttcaccacgcgcaacaagaaaatcccgcgcgaggcgctgcaaaacaaggtcattttccacgtcaacaaggacgtgaagatcacctacaccggcgtcgagctgcgggccgacgatgacgaactggtgtggcagcaggtgttggagtacgcgaagcgcacccctatcggcgagccgatcaccttcacgttctacgagctttgccaggacctgggctggtcgatcaatggccggtattacacgaaggccgaggaatgcctgtcgcgcctacaggcgacggcgatgggcttcacgtccgaccgcgttgggcacctggaatcggtgtcgctgctgcaccgcttccgcgtcctggaccgtggcaagaaaacgtcccgttgccaggtcctgatcgacgaggaaatcgtcgtgctgtttgctggcgaccactacacgaaattcatatgggagaagtaccgcaagctgtcgccgacggcccgacggatgttcgactatttcagctcgcaccgggagccgtacccgctcaagctggaaaccttccgcctcatgtgcggatcggattccacccgcgtgaagaagtggcgcgagcaggtcggcgaagcctgcgaagagttgcgaggcagcggcctggtggaacacgcctgggtcaatgatgacctggtgcattgcaaacgctagggccttgtggggtcagttccggctgggggttcagcagccagcgctttactggcatttcaggaacaagcgggcactgctcgacgcacttgcttcgctcagtatcgctcgggacgcacggcgcgctctacgaactgccgataaacagaggattaaaattgacaattgtgattaaggctcagattcgacggcttggagcggccgacgtgcaggatttccgcgagatccgattgtcggccctgaagaaagctccagagatgttcgggtccgtttacgagcacgaggagaaaaagcccatggaggcgttcgctgaacggttgcgagatgccgtggcattcggcgcctacatcgacggcgagatcattgggctgtcggtcttcaaacaggaggacggccccaaggacgctcacaaggcgcatctgtccggcgttttcgtggagcccgaacagcgaggccgaggggtcgccggtatgctgctgcgggcgttgccggcgggtttattgctcgtgatgatcgtccgacagattccaacgggaatctggtggatgcgcatcttcatcctcggcgcacttaatatttcgctattctggagcttgttgtttatttcggtctaccgcctgccgggcggggtcgcggcgacggtaggcgctgtgcagccgctgatggtcgtgttcatctctgccgctctgctaggtagcccgatacgattgatggcggtcctgggggctatttgcggaactgcgggcgtggcgctgttggtgttgacaccaaacgcagcgctagatcctgtcggcgtcgcagcgggcctggcgggggcggtttccatggcgttcggaaccgtgctgacccgcaagtggcaacctcccgtgcctctgctcacctttaccgcctggcaactggcggccggaggacttctgctcgttccagtagctttagtgtttgatccgccaatcccgatgcctacaggaaccaatgttctcggcctggcgtggctcggcctgatcggagcgggtttaacctacttcctttggttccgggggatctcgcgactcgaacctacagttgtttccttactgggctttctcagcccccgagcgcttagtgggaatttgtaccccttatcgaaccgggagcacaggatgacgcctaacaattcattcaagccgacaccgcttcgcggcgcggcttaattcaggagttaaacatcatgagggaagcggtgatcgccgaagtatcgactcaactatcagaggtagttggcgtcatcgagcgccatctcgaaccgacgttgctggccgtacatttgtacggctccgcagtggatggcggcctgaagccacacagtgatattgatttgctggttacggtgaccgtaaggcttgatgaaacaacgcggcgagctttgatcaacgaccttttggaaacttcggcttcccctggagagagcgagattctccgcgctgtagaagtcaccattgttgtgcacgacgacatcattccgtggcgttatccagctaagcgcgaactgcaatttggagaatggcagcgcaatgacattcttgcaggtatcttcgagccagccacgatcgacattgatctggctatcttgctgacaaaagcaagagaacatagcgttgccttggtaggtccagcggcggaggaactctttgatccggttcctgaacaggatctatttgaggcgctaaatgaaaccttaacgctatggaactcgccgcccgactgggctggcgatgagcgaaatgtagtgcttacgttgtcccgcatttggtacagcgcagtaaccggcaaaatcgcgccgaaggatgtcgctgccgactgggcaatggagcgcctgccggcccagtatcagcccgtcatacttgaagctaggcaggcttatcttggacaagaagatcgcttggcctcgcgcgcagatcagttggaagaatttgttcactacgtgaaaggcgagatcaccaaggtagtcggcaaataatgtctaacaattcgttcaagccgacgccgcttcgcggcgcggcttaactcaagcgttagagagctggggaagactatgcgcgatctgttgaaggtggttctaagcctcgtcttgcgatggcatttcgatccattcccattccgcgctcaagatggcttcccctcggcagttcatcagggctaaatcaatctagccgacttgtccggtgaaatgggctgcactccaacagaaacaatcaaacaaacatacacagcgacttattcacacgagctca
